United States Patent Application Publication US 2019/0032115 A1 - sequence listing, part 2

SEQ ID NO: 1 - DNA, 4063606 bp, Proteus mirabilis (residues 2,031,804-4,063,606 of 4,063,606)
  misc_feature: Proteus mirabilis strain HI4320, complete genome
caatcctaagcgaatgcctgtacctaatgctttggctgcggcttcttttaccgcaaatcgtttagctaaaaaacgaacaggttgtttatgtgattgatatataatccattcattatcagtaagaatacgtcgcgcgaggcgttctcctgaacgccctattatctcttcaatacgtgatatctcaacgatatccatacctataccaacaatagccattagcgacgcgcttctctcattaggcgtttcatttcttcaacggctggtgcaagcccactaaataccgctcgaccaataatcgcatgaccaatattgagttcataaagttcaggtaatgcagcaatacgttgtacattatgataatgcaaaccatgacctgcattgacttttaaacctttagacgctgcataggttaccgcatcacgaatgcgaacaaactccttctcttgagcctgttcatcttcagcgtcagcataagcaccggtatgaatttcaataaaaggtgcgccgacacgatctgctgcattaatttgctcatggtcaggatcaataaataaagagactttaatccccgctaatgataaacgtttaatcgcatcagccactttctcttcattacccaccacgtctaaaccaccttctgtggtcacttcttggcgtttttcaggcactaaacaacaaaagtcaggttgagtttggcaagcaatctcaatcatctcttctgttaccgccatttctaaatttaatcttgtttgaaccgtttggctgatcagcattaaatcacgatcggtaatatgacgtctgtcttcacgtaaatgaatagtgatcccatcagcccccgcttgttccgcaataaatgccgcttgaaccggatcgggataagttgtgccacgggcattacgtagggttgcaatatggtcaatattaacgccaagtagaatatcagacatgctcttctcctgaaaaataacgttgtattaccttagtttacacattccatagagaagaaaaagacaatattatttatcctctatcaatacgctttttttcgcacactttttaatagcaaattgccgaaacagctctctactttttaatggttttccacctaaataaggtttcaaggccattcgtgtaaacctttttgctgctttcaatgtgccagccgtaggaaattctcgttttgccagcgattttaattccaatccagtaaaactatagtgatcaaccaccaaactggcaataaagcctttttcttctcggtatcgataagtcatggtatcagaaacaggttcaccacttcctgcacaatgcaaaaagtctaggccataacccaattgcgttaataacgctaattcaaagcgccttagagcagcttctggcgtggtttcactggcagcaaggatttgcaaacaagataagtattcgaaaaaaagcgtgctatatgatgtgccattttccaaaacacgagaaagtaattcattgagatacagaccactgtaaagtactgtgcctgttaatggtaatgctaaagagataggctcagcatcacggagagtttttatctcacctcgcccactccaacgaatgagcaagggagtaaaaggttgaagagctccttttaaaggagagcgacgaccgcgcgcaccttttgacaatatgcgcactcgcccttcattctcagtgaaaaaatcgagcaataaactcgtttcactgtaaggccgagcatggataacaaatgcacgttgccagccttccacttcagtaacctactattttaaatcgtccacatagccaaggctacgtaaagcacgttcatcatccgcccaacccgcttttactttcacccaaagttcaagatgaaccttgttttcaaataaatcttccatatccatgcgggcttccgtaccgatttttttgattttagcgcctttattaccaatcaccattttcttctggccttcacgttcaaccagaatcaaaccgtgaatatcatatccaccgcgatcgttagtaacaaattgttcaatttcaaccgtcacagaataaggtaattcttcacctaaaaagcgcatcaatttttcacgaataatttctgacgccataaaacgttgagagcgatcagtaatataatcttctgggaaatgatgaatggcttcaggtaaacagttacgcactattttagcaatagtatcgacattcatgcctttttcagcactaatcggcactacatctagaaaatccatttgttgacttaaaaaaccaatatgtggcagtaacttggttttatctgtaacgttatcaactttattaatcgctaatagcacaggacaacgtagtgattttaatttgtttaataccatttcgtcatcaggcgtccaattggttccttcgacaacgaaaataaccagttcaacatcaccaatagagctacttgctgcacggttcattaaacggttaatggctcgcttttcttcaatatgcaagcctggggtatccacgtaaatagcctgatatgcaccatcagtatcaatacccatgatacggtgacgggttgtttgtggcttacgtgaagtaatagaaactttctgccccaataattggttcagtaatgttgatttccctacattagggcgaccgactatcgcaataaatccgcaataggtttgttcttcgctcattcaagctccaattgtattaatgcctgttcagcagcggcttgttcggctttacgacggctggtacccatccctttaacaggttggtcgataccgcttatctgacaatggatcgtaaactcttggtcatgagcttcaccacgtacttgtacaacaacataagaaggtagtggtaaatgacgtccttgcaaatattcttgcaagcgagttttaggatctttttgcttatcacccggactgatttcagccaagcgattctcataccattttaagatgatattttcgatattttgaatatcactatcaagaaaaatagcaccaattaacgcttctactgtgtcggccaaaatagattcgcgacgaaaaccaccgctttttaattctcccggccctaaccgtaaacattcaccgagttcaaattcacgtgctagttcagcgagggtattacctcgcactaaggttgcacgcatccggctcatatccccttcatcgacacgagggaaacgatggtaaagcgcattagcaatgacataacttagaattgaatcacctaaaaattctaagcgttcattatgtttactacttgcactacggtgagtaagtgcctgtaaaagtaattcgttttgtttaaaagtataacccagttttttttgtaactggttaactaatagagtattcatgtgcgatcaatttccattatttaatttgaagcacacgcaacaaacctgtttaaaaacaacgagatattatcgggttgaataacagaactgttgcgtttgcactggctcctgtttatacaggagccaatcatgtttaaagaagtggcatattctacactgagatagaaaggaatgctgtagctattttgttaaaaattacttaatgccaccaatacggctgaaacgaacacctgtaggccattcattttcttgtttctcgaagctcatccaaatcgttgtggctttaccgactaagttttgctcaggcacaaagccccagaaacgactatctgaactaccatcacggttatcacccatcataaaatactgaccttcagggacaatccacgtaccttgaggtaatcccggctgaataaattcaggtacagtaacatctcccggaatagtcataatacgatgagagacatcaccaatcgtttcaattctctcttcttggcgaaattgcgtagctgtagaaattggctcttcaatcggaatcgatttcataccgctaatacgttgaccaccaggtacactttgtaacagtaatgtccattcactaggatacgctgtaccataggttaccgctatttcatcatcacatattgctttattacaatttgggtaaatgtgtaatttcttcgacgtcatgtcatacactattttatcccccggtaaaccaatcacccgtttaataaagtcagttgatggatcacgtgggtatttaaataccgcaatatcaccacgtttaggtttacccgtactaatcaaggttgtttgtgtaataggatcttttaatccataagcaaatttttcaaccaagatgaaatcaccgactaataaagtcggcatcatcgaacgagatgggatctgaaacggctcatacacaaaggaacgcaaaatcaatacaatcgccaatacaggaaacagagagcctaatgtctctgcccagcttggtttattaatcgattttgctaactcttgctgatcctcacttccctgcgttaactcttgtaaacgttttaacttcgctttacgggctggctttaatttaaaacgatctatacaccaaaaaatacccgtaattagcgttgccaacgttaggatcaaggcaaacgtgctagccatattttctccttaaattatttatctttaccaacatgcagtatggctaaaaacgcttcttgtggtaactcgacattaccaatttgcttcatacgttttttaccttctttctgtttctgcaacagttttttcttacggctaacgtcaccaccataacatttagctaatacgtttttacgtaactgtttaacagttgaacgagcaataatatgattgccaattgcagcttggatcgcaatatcaaactgttgacgtggaatgaattctttcattttttccaccaactcacgtccacgatacggtgcgttatcattatgggtgattaatgcaagtgcatcgactctctcaccattaattaagacatcaacacgtaccatgttggagccttggaaacgcaggaagttataatctaacgaagcataaccgcgagaggttgattttaaacggtcaaagaaatctaataccacctcagccatcggaatttcataagttaatgaaacctgattaccatgatagaccatattagtttgaacgccgcgtttttcgacacataaagtaatcacattacctaagtattcttgcggtagtaacatatgacattccgcaataggctctctgatctcttcaatattgttcagtgctggtagttttgatgggctatcaaccatgatgatatcaccattagtcatttccacttcataaactactgttggtgctgtggtgatcaggtcaagatcatattcacgctctaggcgctcttggataatctccatatggagaaggcctaagaaaccacaacggaaaccaaatcctaatgcagatgaactttctggctcataaaagagtgacgcatcatttaagcttaattttcctaatgcatcacggaatgattcataatcgtcagaactgaccgggaataaccccgcataaacctgtggtttgacttttttaaagcccggtaatggtttgtctgcaggcttctgtgcggctgttaatgtatccccaacaggggcaccaagaatatctttaataccgcaaactacccagcctacttcaccacaacttagcgatgttgtatcaacttgtttaggcgtaaaaataccaatacggtcgatattataaacttgccctgtactcatcactttgattttatcgcctttgttgactttaccgtttttgatccggataagtgagacaacaccaaggtaattatcaaaccaagagtcaataataagtgcttgtagaggcgcgtcaggatcgccttctggcgcaggtatttctttcaccagacgttcaatcacttcttttacacccacgcctgttttagcagaacaacgcactgcatcggtcgcatcaataccgacaatatcttcaatctcttcagcgacacgctcaggctctgcggcaggtaagtcaattttattcaataccggaacgactgtaagatccatatctatcgccgtataacagtttgctaatgtttgggcttcaaccccttgccctgcatcgacaacaagtaaagcaccttcacaagcggcaagagagcgagaaacttcataagagaagtcaacgtgtcctggcgtatcgataaagttaagctgataaacttcaccgtcatcagcggtataattgagtgttacgctttgtgctttgatggtgataccacgctcacgctcaagatccatagaatcaagaacctgcgcagccatttcacgatctgttaagccaccacaaatttgaataattcgatctgatagcgtcgatttaccgtggtcaatatgtgcgataatggaaaagttacgtatgtttttcattctgaaattatttttctctattgctttgctctataaatctggctttagcgtcgttcatggacacaaagcgaaaactctatattgcaggagttatgattgatgacgcattctacacactagagacattatactcaaagaaacgttcatcaaacacaaacatttatgataaagcttacctttatttatgcatcgtaactgcactttcactagatagaaatttgatttttatctatcaataaaaaagatcagaaccataaaataagtttaataacaaaaaaatggagcctatgccccattttttatcatattcattctttatcattattcttgatattgtacttgcaattcattgggtggaagtcctatttgtaaaataataggttcaaatccttcatctttactccaccagcgggcaatatttttagctaataaaaagcctaacactccccccactaaaccactacaaaaaatagccaactcactagaaagccacaggctggctatccctgcaacgataaataatcccagcaaaggagtaagataaaccaacatagcggagcgaagtaaactattttctgggataccaacttccactttttgccccaccactaaaggttgctcaacaggaagttctaactgatgaacagtttcagggcctattttatttaataaataagagccacaagctgctcgagcttggcaactcccgcaaccggacgatgagccataacgtagtaaagccctcccttgttgccaatgtacgactgttgcccactctttaaccataacttataccttttactttttggtaaacaccacactgttgacgattttctgtgctgttataaatggcaattgtccaataaaggtaatttcattgccatctttatcataggtataaattgtattacgaccatatctcaatgctttatcacgttcgggggaatttaattgctgaccacttttgttaacataaatggagaaatcgaataagccgtcactatataaaatagattgactaaattcattttcagcaatttgatgattgctacgttttacctctttaaatccttcaggtaacgttgtcacacgccaattgtaattcagtgcttgagtggctttggggatcaacaatagcgggggcatattcactttattgagtgaatctaactcactgatgatttctttattttgattagcggtgatcacccgaaattgttcaataacatcattatttttatcaagcagatcgacccttaatggcaaatatctctcttcatcaataaataagacatattcataacggtcattattttttgatagcacacgaacaacacgacttggaatgtcgccgatatgcgttcttcccgcatcaataaaattgtaatactcagcgagttcagcaaaattttgataaatgatagcagggagataatcaacgatatgttcattacgcaaactaaacgcatctaaacctggttcaaaataactgatttcattccctcgttgcacgatttctcgacgagtgctatccatctgcattaattgtgctactggtttaccatcgacaagtgcatgacgataacgaataggaacaataccttgagaattgatattaataaaagataattcgtaagtagcggtttgcgttgtattacccatcttttgcaacaaagcctcggcatttcctatttgaggttgtgccaaggcttgtgttggtattgataggtaacccgctaaaagtaaagcggataaccatgattttttcattacgactctattgttcctacacgtaattataaattgataccacaatgattactgagcctgttgctgagttgtgttttgcgatgctacaggcacttcatcttgtggtgcattgtagatacggcgatctaactcatactgttgcaacataagtccaaggcgttgattacgctcttgtagacgtgtttgttgattttggcctaaattatcactttgtaaatttaagctgactggtgctccattccccataataggttgagtattaaacaccggcgtatcaacttggaaatcctcagcgctattgttgccattatattgctgaacacccacaatgacagctaatgacacacaggcagcaacaccaatttgtgttaactggctagcccaaggacgtaatttttgtaagaaagagtgctgacgccattgagaaggcgcaggttgctgctcttgctgttgttcaggacttatgcggactggctcattttctaaagcgagtgctacgcgacttgcgatatcaaagtggataacctctcctacatcaccacgcattgcatcacgaactaagtggtaacgttgccatgtttctttcatagattcatcacgggcaatcgatcccattaattctttatcaagaacttcgccatccataaatgcagaaagtttctctttttgcatgtaaaagtacccttcagtaaatgagggttcagccatcttataactcttgtattaatggttgaaccttattatcaatagcttctcgcgccctaaaaatacgtgaacgaactgtacctacagggcaatccataataacggctatctcttcatagcttaagccgtcaagttcccgaagtgtaatagcaacccttaaatcttcgggtaacgactctatggtttgaaaaactactctccgtaactcttcagacaacattaaattctcagggttcgaaatttcttttaatgcgtttgatgtttcaaaattttcaacatcacttgcatctaagtcatttgaaggcggacgccgcccttgtgctaccagataatttttagctgtattcacagcgatgcgataaagccacgtataaaatgcgctatcaccacggaatgatccaatagctcgataggcttttataaaggcttcttgtgcaacatctggcacatcaccctgaggtacataacgggaaatcagacttgctaccttgtgctgatagcggataactagcaagttaaacgctttctggtcacccagttgtaccttctcgaccaacatttggtccgttaactgctcgctcattagagatggactctcccgaagtcaagcctcaaactatttttcaatgactccgtcatattactctcgttattccttctcgtttttatgagctacttacgttagagcattaaaatagaatgaagttcaattcaattataataataagagatgaatcacaaaaaactgtcgttgtaatcaccaaccaatctgcaatttgccaagaaaaaagcgataacacaatgtgataatttaaatatatacctttatttacaacaatatatacaatcttaaacaatgtaatattaacggcaacattagtctttaataatataaataaaaatctgtgacccaagattggaactgggttgtgtaatgaccgtcattattgcggataatcagctcttcaatattacatggtttagtttcgccttgatactgtctttgaaaggctagcaatatgcgatggtaaggcttatctgcactatctttaatattaactcgctgtacgacattccacccttttctttgtgagatttcaataaactgttcaccgattaaatagggtaacaccacacaaaataggccttcatctgtaataagttgttgtgcactgtcaagcaaaccttcatgggtcaacgttttcgtataacgggcttgctcgcgctcttggttacggcatgcaaccgctggctcaaaatagggtggattactcacaataagatcatagcgagttggcgcttgttgcgcatattgataaatatcatgatgataaatatggattaacgaactccactgtgattgttgcgcattttcactcgcctgtaatgcggcatcttcatcaagttcaataccatcaatacgctcaacctgcggggcacgttgcgctaacatcaaggcaattaatccacttcccgtaccaatatcaagcaccgtttttgctttagtgataggcgcccaagcacctaataaaacgccatcagtacccactttcatttcacacttatcatgagcgacaaaaaattgtttaaatgtaaacccgcctttgcgtaaacctgctttctttactttcttttgcttcattgaatcgctctaatgatttgtataactctttctattcttagaatgaacgcaatccatataatagaaaaagcgatatatggtaagataacttttttgctacctctatcttaacattaaacgctttatattcgatgcttgcttattgactttaagcctaaaaaacaacacatagctgaaacaatcgatgatatataatgtgatagcggtaaatcctctggcttttaacagaggataatgtcaaaatccgcgccctaaatagaggtatacaatgacagccacgacattttccagtcttgaacttgatgaaagtttattgaccgcattagaagaaaaaggatatcaacgtcctactgctatccaagcagaagctatccctgccgcaatggaaggacgtgatatattaggctctgcaccaacgggtacagggaaaacagcggcattcttacttcctgctattcaacatttacttgattatccacgaaaaaaatcagggccacctcgtgttctgatcttaacccctacccgtgaacttgctatgcaagtcgctgatcaagcaaaagaattatgcgctcatacccatctagacatcgccactatcaccggcggtgttgcttatatgaatcacgcagaagtttttagtgagaaccaagatattgttgttgctacaacaggtcgcttattgcagtacatcaaagaagagaactttgactgtcgtgctgttgaaatgctgatcctcgatgaagctgatcgtatgttagatatgggttttgctaacgatattgaaactattgcaggggaaactcgttggcgtaaacaaacattactcttttcagccacattagaaggtaatgctgtgattgattttgcacagcgaattcttaatgaaccggttgaactgaatgccgacccttctcgtcgtgagcgtaaaaaaattcaacaattttactatcatgcagataatcttgaccataaaactgccttacttgcacatttactcaaacaagaagaagttaaaaaatcgattgtttttgtacgtaaaagagagcgagtcagagagttagccgcagcattagaaaaacaaggtatcaaagccagctaccttgaaggcgaaatggctcaaacacaacgtaacgaagcgattaaacgtgtagagtctggcaaaatgcatgtgctgatcgcgacagatgtggcgtctcgaggtcttgatttagaagatatcacccacgtctttaactttgacttaccgcgcaccgctgatgtttatttacaccgtattggccgtacaggtcgagcgggtcgtaaagggactgccatttcattagttgaagcacacgattatccgctacttggtaaaattagccgttatatccaagagccgattaaatatcgtgttgtagcccaattacgtccagtaactaaagcccctagtcaaaaagcatcatttaagccttctaaaaaagtattagcaaaacgcaaagcgaaaaaagtagaagagaaaaaaaacgttaaagagaaagtacgcgcacgcgatcgtaaaaatattggtaaacgccgtaaaaccgctactgataaaaccaccatcactgcggaaaaaactaatcatataaaaacagagcaacaataatctgtcttttttacgttactttgaaccataataataaaccgtcgttatttaatagcgacggttttttatcttatcttctttattgataaacaaaaaacctgatataaacataccaggttctatcattacttaataatttttagtgaaaattacaggctttcagtgaaagtacgagtaattacatcacgttgttgttctggtgtcagtgagttaaaacgcactgcatagccggatacacgaatagtcaattgaggatatttctcaggattgttaacggcatcttctaatgtttcacgacttaatacgttgacgtttagatgttgaccaccttctacacgtactaccggtttagattctaccggtacttcacggtattcgatgttgcctaatgcatcacggctaacaacttggccttcttcaaagccttttttcgcacaaatacaacgtgcttcgccgttttcatcatctaacaaccaaaaagaatgtaataaatcgtcgttatcagctttagtaatttggataccagtaatcatttcgacctccaatgtgggcacaaaatcaaattctaatggcatatcagaatttgggtatttggtctaaccaatgtttctgtttacttatataccagtataaatggcgtcattctttgataaatatcaataaaattgataaggacataacgggtaatggtgcaaagtcttgttttaaatcaataattacaacccatataattgcaattttttttgtaaattttcaaaaatttttttaaataacaattaattcgattttttcgagacggaacattttctttccatgggtgaaatcggtaagcttagccccataagatatcaacaaggattttatgttatgactacaccattaacttggcatgatgtaataggtgctgaaaaagaaaaaccctattttcagcaaattttgtctcaagtcgcacaacaaagacaagcaggcaaaataatttatcctccacaagaagatgtatttaacgcttttcgcttcactccctttgaaaatgttaatgttgtgattttaggtcaagatccttaccacggccccaatcaagcccatgggctttccttttctgtacgtcccggcgttccggctcccccttcattagttaatatgtataaagagcttgaacaagaataccctgacttcaaacgacctaatcatggttatcttgagagctgggctcaacaaggggtattactacttaataccgttcttacagtagagaaaggccaagctcactctcatgctaactatggttgggaagtttttactgacgcggttatcgaacaaattaatcaacgtcgtgaaggcgttattttcctactttggggcgctcatgctcagaaaaaaggtcgttttattgatactaataaacactttatcttaaaagcccctcacccttcaccactctctgcacatcgtggttttttaggctgtgggcattttaaacaaaccaataatctattagcgcaacaaggacgcacgcccattaattggcaacttgatcctattgaataagctagtgataaaaacacaaaaccgcacaaaagtgcggtttacttatcccacgctctgacttattggcgcattgatataagaattatggctcttatttcgataccactaccattgctggacgtaatagacgaccatttaaggtatagcctttttgcatcacatcaacgacatggtttgcttcatgctcagggctatcaattaatgtcatcgcttggtgtacttcaggattgaaggcgacatttttttcttcaacgacttcaataccaaacttacgcaccgcatctaagaatgatttcagggttaactctaaaccttcaatcatcggttgcatttgttcattttcatgatcagcggcagataaagcacgctctaaattatccaatacaggtagtagctcattagaaaatttctcaagcgcaaatttatgtgctttttcaacatcctgttgagtacgacggcgaatattctcaatttcggcttgagcacggatcatcgcttcacgttccgttttttgtgattgctgcaactgtttttccagctcatcaacgcgtgcaagcgcttgaactaactcagcttgtgcatcaaactccgcctgagcgtcttcgcttttcacttgctcttgagattcattcattaccgattccattccttctttttcttttgagacttgctcttcatgtacgttttgttctttactactcatgaatatctccgcgtagttttagtattcatcttcatatttagtttattatggggatcaataaacgggtttcaaggaataggcgctaaacgagggtaaaaaaaatgccagataataccgtaacggaagaaaaacaatttaaatgcattggcatcgtcggtcatccccgccatcctgaagcactttcgacacatgaaatgctctattattggctccttgataaaggatatgacgtcattatcgatacccaagttgctgaagaattaaagctcaccgatgcacaaacgggcgatttaacacaagtcggcaaactcgctgatctggttattgttgttgggggtgatggcaatatgctaggcgccgcccgtgttttatcgcgctataatatcaaagtgattggtgtaaaccgcggtaacttaggttttctgaccgatcttgatcctgataacgcattacaacaattaactaatgtattagcaggccattatcgtgaagaaaaacgcttcttacttgaagctcgcgtctgtgctgaaggacaaagaacacggattggcaccgccattaatgaagtcgtacttcaccccggcaaagtggcgcatatgattgagtttgaagtctatattgatgatcgttttgcattttcacaacgttctgatggtctaattattaccacaccaaccggatcgacggcgtattcactctctgcaggtggccctattcttacacctaatcttgatgcgattgcgctggttccgatgtttccccatacgctctcttcacgccctttagtcattagtagcgacagtcaaattcgcttaaaattctcacaaaccaatattgattatgaagtcagttgtgatagtcagcttgtattacctatcaaagaaggggatgaggtaattattaagcggagtcgacaaaaacttaacttagtccacccaactgactacaactattttaatacactcagctcaaaattaggttggtcaaaaaaaatgttctgatttttgtgcctcgctactttactgtataaaaaaccagtttatactgtatgtaattacagatatgtttttatacaggagaggcactatgctgactcaattaactattagtcattttgccatagtccgtgaacttgaaatcgacttttctggtggcatgaccacaattaccggtgaaacgggcgcaggtaaatctattgcgattgacgcattaggcttgtgtttaggaaaccgtggtgatgctaatatggttcgccctggtgccactagagcggatttatgcgcacgattttcactctctgataccccttccgcccagcgttggttagaagaacatcatcttgacgatcataacgaatgcctattaagaagaaccattgcagcagatggccgctctcgtggttttattaatggtacttctgtccctttgtctcaactaagagagcttggctcattgctgatccaaattcatgggcaacatgctcatcaacaactgttagagcctcgctaccaaaaacatttacttgatatctatgctaatgaacctgctttattaaaaaagatgaaagcggcttatcaaacctggcatcagagttgccaaaccttagcgacttttcaacaacaatctttagaaagagaagcaaggcaacaactgattgattatcacttaaaagagcttaacgagttccaacctgtcgcgggggaataccctgaattagatcaagaatataaaaggttatctaattgtggtcaatttctgaccttgagccaaaatagtttacagatcttaagtgataacgaagaacaaaatattttaagtatgctgaatgtggccaaacatgagatcagcgaactttccacaatggagagccaatttaattcactgttagatatgctggaagaagcaagtattcaaattagcgaagtgagtgatgaactacgccactacagtgatcgtttagaaatggatcctaaccgtttattcgaattagaaaaacatatttccaaatatattagtctatctcgtaaacatcgtgtcacccctgaagagctatatgaattgcatcaacaattaattgaagaaaaagaggcactattacgccaaaatgatgactgtgatgcattaatggaacaagttaaaattgatcatgcagctgcattggacgtggcaaaacaacttcatcaaattcgtcaacagtatgcacacgaattaagccagttgattaccaatagcatgcatcaattatcaatgcctcatggctatttaactgtagatacattgtttgatgaaaatgtcttacaaattgatggtgcgacaaaagttgagttcaatgtcaccaccaacccggggcaacctcatcaagctctctctaaagttgcatctggcggtgagctatcacgtatcgctcttgctatccaagtgatcaccgcaaaaaaaatggatacacccgcgctgatttttgatgaagtggatgttggtattagtggaccaacagcagctattgtcggtaaattattgcgtgaattaggcgaatcgacacaagttatgtgtgttactcacctaccgcaagtagcaggttgtggtcatcaacactattttgttaataaagagactaatggtgaagagacagaaaccaccatgaagctgttaactaaaaaagagcgtttacaggagttagcccgcttattagcaggaagtgaagtgactaaaaacacccttgctaacgcaaaagatctgctggcagcctaacgattaacaaacttttatcgatatttagggtcttaggcagagcgtgaaaggttttcaattgctgcattgtcgattatcatcgtcactatgaccctaaaaggaatgtaatagccatgcgttttaaactgttaaaagttgccgccttatctttagtcgtaatgacttcaggttgctcgatgttcgaaagactggtttatcacccagatatcaatcagggtaattatttaacaccagccgaagtcgccaaagttcaacaaggaatgacacagcagcaagttcaatttgccctcggaacacctatgctgaaagatcctttcggaactcaaacttggtattatgttttccgtgaacagccaggccatcaaaaagtgcgtcaagaaactctgacactaacatttgataataatggcatactgactaagattgataaacaaggtgatatgccgagtttttctaatcaaaccagtaaagactaatctcactatacgattggcaaaaacgaactgcaccccatttgtaattcaacaatggggtgtgttttataaccaacatatcgacgcaatcaatgagatacaatgatttgattatgacgtggtgaaaatgttaactattcagttttttggcgtgctttttcagcgcgtttacggcgcatctctttaggatcagcgattaacggtcgatagatttcaacgcgatcgccatcacgcacattatcactcaattttgctggccgactatagatacccactttatttttagttaaatcgatatcattacaaatcgttaaaatatttgaggcaataattgcttgttcaacagtatcccccagtgttagctccacagggataacatattgtttatctggtaacgcgtaggctacctcaacccatattttagtcacgataaatctctttcgctctttgagtaaacgcctgcaccatattatttgttaagtctttaaaaatacggccaaaagctaactcaattaatttattggtgaactcaaagtctagctgaaactcaaccttacatgcattatcatctaatgcggtaaatacccagcctccggttagtttacgaaaagggccatccacaagacgcatatcaacacgttcattggtttttaaaaaattatgggtagtaaatgttttactgatccctgctttagaaacctgaacagatgcaatcatttcttctggagtgcttttgatcagtttacttccaacgcatcctggtagaaaatcaggataagtaagaacatcattcactagtttaaacatttgctctgcactaaaaggaactagagcagatcgactaatctgaggcatagttattcctgtacgacaacactgtgtgcgatcatatcattgaacagtgattaaataaaaatctaatggaatatagcttaagttttacgcaattgaaaagaaaacagacgcttaaatgatttctttctattgctcatacagtataatgtggaaattatgacaaagaaaaaatcacacaaacccggctctgccactattgcactcaataaacgtgctcgccatgaatatttcattgaagatgaaatcgaagcgggactgtcgttacagggctgggaagttaaatcactgcgtgcgggtaaagccaatatcagtgatagctatgtaatcatgcgtgatggtgaggcgtacctgtttggtgccaccattacaccgttaaacgttgcctctactcatgttgtttgtgatccgacacgtacgcgtaaactgttattaaaacaacgtgaattagctaatctctatggccaaataaaccgtgatggttacaccgtggttgccctttccttatattggaaaaatgcatggtgtaaaatcaaaattggcgtagctaaaggtaaaaaagatcacgataagcgtgacaccataaaagatcgtgagtggaaattagacaaagcacggatcatgaaaaatgctaaccgctaaattgcgttaactactagcaatagcaggtatttttctgatatactcactttcaacaacttggggctgattctggattcgacgggatttgcgaaacccaaggtgcatgccgaggggcggttggcctcgtaaaaagccgcaaaaagatagtcgcaaacgacaatcaatataaagcactagcagcttaataacctgcctagagccttctctccctagcttccgctcttaagacggggataaagaggagtcaaacccaaaagagatcgcgtggatgcctagcttggggttgaagcgttaaatttaatcaagctagcttatttgtggcgtgtctgtccgcagcaagtaagtgaatttaaagactagactaagcatgtagtgccgcggatgtagaaatttcggacgcgggttcaactcccgccagctccaccaaatttggtggatcagtgataggacaacggtttcaaaaacaagaagttagcgaaatcattaagactatacactgacaacaaaaggacttgaaagtgcacgcgaaatgcacgtacatttgaataaagagccccaagggcaactccttggggttttctatttgtaacaatatgtaataaaatatttcattcaatcccttcgttagaaagaatttctgagcaatattaattcattaaatacgaaataatatgcatatcacctaatcctcttgcttaacacgttaagatgataaccccttttatttgtatgtcttattggttccttattgtaggatagatgtaacccacaataagggattgcacaaatgagaatgactcagcacagcaagtgaaattatctagaattaaaactttcaaacgcattgaaaataagaattattaccattaatatgggtatcctataaaataggactaattattcattaggagctgaatatgactaaaaaatattatattcataatatgttctggggctattttatgatgttggtgatgatttatcttaattataacgatcacactattgaaagcgtattaatgctaactttaagcatacctagtgcaattttttttcctttctccaagatgcttatcgaaaaattcacattaaaatatacaacaaaaaaattctggaatactggattatttataaatacaccagctaaacatggtggagtagctctataccacttattttgttttatattttcaattccatttagcatgatatatctagctctatatttcacaaaaaataggataaccaattaaaatcgattatcctattagcctacatattaaatacctatcgcactgctgactttttcaaccaaagcatcgtcaatcaaggcactaactgttgcaatgatgagggcataccctaaaattccaacaggcccaccgacaattaaactaaaggcaaaggctgtcaatgccactgctgccataccagcagtaattgcagtggctttaacaaaaaatggacgccaatttcctgttttaaccgcttttttaaattcaacaagtaattccacggcattaatcgcgtgattggtatatccaagccctttactaaatttacctaagtttgaagctaactgttttgcatcaatagattctaatgcttttataatagcagctctatctttggcattaattttattattaatattctgcccatatttttcatatgtacgcaatgcatcctctacacttctgattgtttttccttttgcttgttctgctaattctctagataattgagccgcctttttaccaaattcttgagttactttctcataaaatgaaattgtaaatttcacaccatctttgatgtcattaaactctttttcctgctgaggacgaggatctttatccttcagtttaattgcaggaaagcctgaataaacatataaagggggtaaatttgaatttttaggaaacacaatgattgcatcattaaattgatgcggatatggtacatctatccttttgttttctaccttattaggtaattctattttttctggatatgagaattttttattttcatttgaatgtttttgaataatatttccttgtaaaccaaggccgctaggggaactagtgggcctaagtaaatattctattcctaaattctttatatctacatgatagctattagcagcgtaattaactttatatacaggaacttcttttgtcaccaatacaccatcagttccaactaacgcggcattcgctttattgttttctttaattatagccattcttgcattaacattaattgttccattgttttttgcaatttcattaagttttccagacatcaaatcaggattattaattaagttttctgcaggaatggtagacataaggtcaaactcattaaatgaattattatcaaattcactaaactccataaattttactgagttcaccttattatcatcaatacggttttctttgctgtataaactaataacagactctattaatttatcttgaattaaattaatagcatcctttgtaagaaaatatttctttttaaatgtctctagttgctcaataacaacgccattgaaatgcatcacacctttatttgtaactaattcttccttatttgagctgttagttagtttattattattgctagaaataataacgggtatttgcggtttattcactttaaatttagtatttggattaaaaggtgatgatccgccattacccatattaggaaatggatattcatctttatcactatcagcaagagtgggtatttttgaccaaggtaagttatttgatgtagctggcgtcacaattaaacgttccaccccattatctacactgaccactcccccttcagtgatccaaccaccatcttcatcagcccctccttccgtatcataaattaagccattttgttttatatcacgaataatatcatctgggagcgatgggtattgatcaacgttagctcttgtaataagcatataaactcctttttatgtttgatagcacacaaaccctgtgtgtaaatacagtatatacagagaaaatatcgtcagacaacctgtttgtttcggctatattcggaataattatcattattctttagctcttccttgagccaaataaatataatcaatcaattatcaatttctggtgcgctattgatatcctgattttcttcttctttttgtctgcattcttcttccgctttctgcgcttcctccatctcacgcattctcacgttatagatggattgctcaggcatctgtacacgaacggaaataaaacgaccatcagggatatctattgggtcgccgtctttgtaaccatcaatatcattacgggcgaatttaggtgcgttagggtgagttcgatgatacgttctcacgaggatagaaccgtcctccataacttcagagtctacccatatcaacggctgtttattaacatcaagtggaatttcaataccaccatcgacaccgccccaacctgcatctgagttaaagcctaaaacaccttcgatgaaatattcaccttgagctactcgagtaaccgtagcaccttctgattcgtcgttagtgatgaatgaaccatcagaattgatattaattattggggaggctttcttaataaacccttgcggagctattgtgaatgagtacccgccactcatccgcaagtaacgggtatcgttttatttcatcccttaaaaaattaaggcattcttaacgtgacaatgaatgctgtatatccggctgcagcatcttcctgaatattttcaatggccaactgattattttctgatattttgttctcattaaataatttagttttgcctgaccaagatgcacttccatctggacggaatccaggattcagccagtgaccaccatcgatacctgaaatccacagattacgctttgttgcctcctgacacacttcaattgcagcttttggtgataagtacatgcaggcgttgccttttaatttaaagaattcttcaccattgttatataatacgttgtaatcaaataattttttttccatcattgtttctcccattgaattcgtgagtcatcaatccatctaggatcatttttattactaatctgtgctacttctccggtgcgatcattcaccaccacatattttcctggctcaccatacactgtggctggatcattacgacctaaaccatcatccgtatttttaggtctacgctgatcaacagattttcctttagcacctttagcaataacatcttggatatctttttcactccaaccacgtcctcccatctggtcttgaatttttccttcaattttaatttccgaagaattgtcttttttccctgtcgacaaatagatcggttttatccctaattcccacggaaaaatcaaaatcacgggctctcgcaatatcgactgtcttttttcattttcgctgaaaaaagtaggtgcttctaacggcaattcattaaatcttgaaatatcatacaccttaccaggtagatacctatgccttttcggttgaggtggggcgataccttttaaaatcgtcgcattgcctatttgaacctttctttcttgtttttcatttggtaacgtataggcaaaaacacctttctcggccgtttttctcgcttctaccacgcgtgttttaactggggtctccgttttcactagttcaatttgctttgctccgttcacccccttttcaacaataacggcagacgtatttatcatgcctttttgtttcgctatttctcttaactgagtttctttcggaatatttaataccctaccttccctcgttaatgcggtttctctatttttagggtattcatcataaatcatggctgggtagcgatcactgccttcacccaccggaggtgagtacaacatcagccctgcccctaaacccagtgcccgacctaaaatcgctcctaacgtttctattgctgttgttgtactagcagtggttaacgtaggcgtaaaaacagcaacaggcgcgagtgtcgctttattaagcgtttttcctggaataagcgtcgattgtgcggaggtgatagccaaatttaactctgaggggattggtttattgatataattaccctgagtgaaatgtgtaatcgaatcaaaagtatcaatcgctttctttaatgcaaatctctgcatgccaataaattgagcataacgttgcataaagattttatgcgctttagcgtactcccctgaatgatagagatccatcatctctttgcaatgcttatctttagtcaaaaattggcagtccattttgccacagacaggacaaatatttcttttcatcaaatccaatgacttgataatgggtagccttttttcatccataaaaatttccttattcatttatctggataaagatagagtatattaaatgctcgacaagctaagtatgatttacactgtgtataaaaacagtgcatgtagcgtaaataccctcaggcaacccatttatttaggccgcattaggaatgattattattatcatttaattttcccttgagcaaaataaatataatcaacccattatcaattttggtatcttattgggtcctaattttcttcttcttctttttgtctgcgttcttcttcctaatcaacggatacaatattgttcgtcggaatatcaggaaattcataaaaaacataatattcaatgttctatgagagatagttatgactgttatcaaaatacattagcagagtgagtcaataggatattaaaaatagaatactagttaataaagccgagaaatttagaacaagatcagagattggttgacgaatcaatacagatatagtcattactagctatcaaaccgtggagctaatacctctcgattgccattacaattttgttcactaacgataccctgtaattctaactgctctataatccttgctgctctgttataaccgattcgaaattgtctctgaatacctgaaatagaaacccactgttttcctaccgtaaattcaactacttgagcaaataatgggtcaagctcttcagctgacatatttgtattctggacatcatcataaagattaagataactcacgcttccccatcgtttacaataatcgaccgcatccctaatatctgaatcactcacataagcaccttgaattcttataggcccagagaaactcggtgatacaaataacatgtcacccaaaccaaatagtgactcagcgccatactgtccaagaattaaattagaatcagccctagacgatacagaaagagcaatacgtgtagcgatattaattcgaagctgtgaaccgatactggtggatacagggctacgagtcgttagtattagatgaatgccaaccgcataaccttgctgactcaatagaactaacatctctcctatttgtttatactcgccaatgagttgaacataatcatcaacacaaacaacaatttcaggctcactgtctaaataaggatgctcactataatttttattagagcgcccaaaaggatcaggtataggcttacctaactcttttgcatttgatattaccttattgtaaccactcaaattgcgctgatttaacgcactaaataatttttgacggcgttgcaattcagagactaaaaacgataatggctttattgattcaatagaatcagaggcaacaggaaacaataagtggggtatatcgttgtataaactgagttcaagctggcttgtatcaaacatcacaaagcgaactttatccggtgggtttctgtataaaatgctcattaccaaggaatgcattaacattgacttacctgagcgcgttacacctgtaataagtaaatgtggcatttgagccaaatcccagcctattggttctcctataatatcttctcctaacatgacagaaagggaagataacccattgttttcgttccattgattaaagcattcaataaaaggcaccgctcgacgatatgtgttagtcacgcgcaatccgatataaggtgtacccgcaataaaatcaataacttttatatcaacgacgctcagggaacgacacaattctggcactaacgctatcacttgagagacttttatccctctacccaattcgattctaaagagggtaaatgttgcgccttcatcataaccgacaacctcacctctaatttggtattgcaaaaagcaagactcgatcgcttgagccattaaatccaattcttgagatgaccagcaaagctcagaggtatgaataaacggttgtgccatcaatttctcccatctagggggggttaattcagtaaattagagtcaccttcgatatttcagcgattaccaatcaccccaattgatatttcttaaagttctcggcttgttccagcacacttttatatacttcatcattggccactggcggaaaaccataacgatgtaataacaaaatcaagtcaactttcagcttcgctttgatatcttcccggttgctccagtcagggtattgtgtgctgtcatcgacaataagtttcatgtccttagcaagtgccagcattttgtcgtcatcgtaggtaaaatcgtatttctggcacatatgctgcaaaatatcgagaaaggctttctcctccatatcgatgccgatatcctcaaatgacatcatttctgccttgatgtcataaatcatatccgccatttgtgcagtgaaatcgtcgaactcttcgccattgagcacatcattttctttgcgttggttatactgctcaaccaatgcttggaaacgcttagagaaattaatcccttgcagctgattgaccttttggaaatcactaatggccttttggagcatcttttgcaacagttgcattttagtattcggcaacttgattttattgatacgagccatgtattcatcatcaaaaatatcgatattttcagctttttcgtcccctaaagtgaagatctcttccacgccttcggctttaagggcttccgctatcatctcacgtactttttgattcatctgcgccgtatctggggcatcacctttggttaatttatagactatagagcgtacagccaaataaaaatggatatgttcacgttcatcttgggtgatatcttcactgcccacgcaaatatcataagcggctttcaaccgctttactaagcccataaagcgcagttcaactttcttggtttgcaggacaaactcagccgcccgattaaggcagtctaattgccgtgttggcgagcctgaaaagtaatcgcgactatcgaattgatgaaatacctgtgaaagcaaattgaggtgattacggacttctacaatggattgctgaacatcttcaaagttagacttatcggctttagaatacatcgccagcgccatattcatacggcttttaatcccgatatagtcaacaaccagccccttctctttcccctcaaaacgacgattcactcgagaaatggtttgaataaggttatgcttttgtagcggcttgtcgatatagatggtatctagctcaggcacatcaaagcccgtcagccacatatccaccacaatggcgattttaaagttggatttcgggtaatgcgcccgttaaggatgcgttgcttttttcgatagtggataatgcagtatcaataatcaccgcgatatcatcttgtttcgcacgctcttggacataagaccaacgggatacttgtggtaaaaagaaaacgttatcttgttgatagaaaacatccatatcaacaaaagcttcctgaccatttttgattaattggctgcgtttggcttcgaatttatcactgataaatttcaggaacaccaaactgagtaccacatgcttatactcagaagattcaacactgcctcgcagttgattagcagtatcccaaagggtttcttcaaagcctttggttgttttcttcgcgggtgatttagccatgtcgatagattctcttttttatcagttattatcggcaagcgctaagttagcttcggttatttttacgctaactgccgataatatatacaaaataggtttggttaagattatctcataaaatcaggttggtttgggtggtaaaagctaaattatatcaacctagatacccaatatttattgctgagcgttaggagagtaaaactgataatcaacaatatctgcaccaataggccctgtttttgctgtaacccatacggttcccgtattttccttggttttcgattttggatctctaatacaccaaaaaacccattcccctgtataaatttcttttatccgtataccatattcacattgaggggctttaagacgttcaggccctggcgagacgatatgatattgtgtttggtagtgaattgtttggtctaatgataaataagcaagcacattaaaagttggaataattatcataaggccaagaaaagccccccaataatcactgataacatactttgatgggcgaaaaaaagggtgccatattcccccaataatccctgtgaaaatagcaaaaataataataatcgtccatttaggaaaccattcaaataatacaatgttatcgcctaaataaagcgacaaaaatagataagctaaccaagagcagtacaggataacaaagatgtaagaaggtaatgattttttcttgctgcctttactatatgatttgaattggtattccataaaaaccttaatttatttccctaaattaatgacaacccggctgattatagttacttatattcttgtatagcaatatcgtgttgactagggtacttaattaaatttgttacccatactccaaaccagctatctatttactggcataatcgattgtagaagtaagcagaagtattaaccttagcgttcattacactgaaatatataggtcatcaacaggaaatattccgaatggataacttaacggaacatcgcaattcatctttggcaaattggcttccagatttttttaaacaatggcctaaaaatatcgattggtctagagaaaaaaagcacaccaaaattgatatcaatacagcagaattaactcagtttctcaaccaactgtctgctccccttaaattagtacagcatcgtgctttatcgtttgatccatgggaagtagcaggccttgaacgtaaagaagttcgcaatacagccatccttgcttggcttcttgatcctaaggggactcatggttttggtagattaccattgcaaacactgttacagataatacggcacaacaaaaatgatattccaaaagattatcatcactattgtcgagtgcaagttgaaaccaatccaactggcgattgcaccaatcgtgttgatatagaaatcgatgctgataattttcttctatttattgaagtaaaaattgatgctaatgaacagccagaacaaatagcccgatactgtaaggatgccaaacagcgttccatgtcacggccatgggctgttgtctttttaacaccacaaggaaaagaatcacagacccgtggtaaagactttaaatctgaatatgtgccatgtttatcatggcgccaactcgccagtagtttggaagatcccttgcaatcgcactataacgaattcatttctgctgataactactctccatcacgccaaatagcagcacatgccgtattttgctttcttaatcgaattcgtcaattttaattcaaaggaatagatatgaataaactcagtgaaacagaacgccaagcgggtgtacaacttctctcacaactgaaaatgtttaacgaggcggttgtttattttgaccaacatatagaacctgctttttggaaaagttttgataagtgtattgaccgatttatcaaaaataataattgggcaggtgatgctgattatgaaaacaaagggtattgctggctcgcaccgaaaaattggcttattgaagatgataactgtaaatattattttgcaactagtacaactgttgatgaagaactcgactataccttagccgttctgactggtcagggcattgagcaagggaattttggtttcgaatttcaattgaatgccgcgcattttggaggagccagaaaactggctagttataacaattcaatgtctgaaaaacataaagaagacaaagaaaaattaataaaaataggcttaaaagatcaggtaaaaggtaactattttattcctatcataattgattcaaaattacttgctgattgttgggcgctcaatggtgaattcccagtagagcatgagattttttctccgcttagaaatgcccttgagatactattcgaatcaactaacacattggataatatgttccgagatgccattgaagtgagtgaataagcttcgatgatgattatcatttagtatggttaggctttttggttattaaattcgcagctaagccagcgggcaaatgccatagcccgtttttcaaagtctgctatgctctctcgaggtttaatactaatttctaataggtaatccatatcttccgctaatgcaggataccgtgaattaaatttggcgcggtactcatggagagagtccggccagtcattatcttgttcactacgaaggatgttggttgctctgataagctttcgtgcagccgagcgccgaagctgtaactttttattttcattagaagatgcttttatttgaatgactagtttgtccaaaacctccataaagtcaccattcacggccactgcaatagcttttgaaggtttgaaagcttgaaagtgatggcttaagtcctcgccataaacgcagtgacaatgatgtttaatccagtatccccaactgagtacattatctggatcgagaacctgttctaacagaccacaatcaaaatcaattttactgataacgggattgttttttttcaagaacagactgaacagttgcaaattgctctttaatagtctgatcaggttcatatttgaaaataactgtcatatccagatcagacttacctacttctgcccggccttcagctacacttccgtatacgtatagactgtgtataagcttaggaaagtaacgtgttagatttgtcacaacacattcaattatatgtgagaattcaggttgaatttccgcgcgtcttggctgggaaataaaatcattatgatcgacggccatcttttctcctgtttgctaatgttatttttcctgataacaggcattttgaacctgaaattgttgtatccaaactattatgccttaatatccactcctctcttacagtagcatttttcacgaaaaccataaatcagcataatggctaacacacctgctatctgatccgcagacttccgccgactattgggttttatgcacttgaacgcaccatttatatcactggatcctcaaagaacgtggcaactggtttgagaagactaataagcttgatttagctaacctaattccagagtataaaacgtatcctaaatactaaagcgttttaatgcgtttattatcttatcgtttttatattgaaatacaaaacactctaaataagagtatcgcattataaatttcaaccattaaatataaacattacatatctattaaaaataaaaattaaagttaaaattaaaactccattttaaattatcttttttagataatattagatattaaaataaactcagtttaagagagtctaaattggatatattaaaaatatattcagatatcattaaataaataaacaaaaggtgtattatataatattgttttgttatttatcctctaaaaaagaataaaggaataatgatatgaaaaaagtattactcagtcttgctatgctgagtgtaatatcaacgccggtattggctaaagctcctgtagctaacttaaaaatcaatggtgatattaagccaccaacttgtactattaatggggcgacacaaagtgatatgatttttgattaccgagtcataagcccaacgcttatccctcaatcgaaaaactacgaatatcctaacggtatagtccaaaatacagttacgattgaatgtgatgctaaaacatatttaacctttgttgcatctgacacttatgacagtgcggaattagctaataatacgctagcacagtttcatttagttgataaagaaaatcctgaaaccgcagttggagcagcctcttttttgtgggaggatgtgactgttgatagtaaaccagcgtacatttcacgagcaaatgatgttactatcacagagacaaattactataacgttctatacaaaggcgcaaccaatggttggacatcagaacaacaaaaaggcaatgttagtaaagaatctctggcactaattccaggtgaagttttccaagcagtttttaaagatgtatataaaattccttcttttcttttatccaaagatgcattaaataaaaaaggaatagatttatctaatggcttagattttatgggtgaagctgttctcacttttaactttggtgtctaatttttaaaataactgataatcacaatatcattaacttttatattgtgattatctttacgttaaaagtttaacagtgcttggcgcgctattaatgttctgaatatcaaattaacacatcattcaatcaggaacgatacatcaatacttcctttataagtattcgtaggtatattcccattggcacaaaggttgaatgataatgacttataaacagatcccccattatatttgcctgaaggttgtcctgcataaaactctaaagcttcggaggaattgttattacatactgcattagttattgttttagttgcatcagataccgtgatataaggtgcaacttctttatttttcaaagggatacttggagacattgtcatcccagttttactcccattgactagctcattatagggttttaatgtcacatacatatttcctgaatgaggacaagagacaagcatactagcgacactttgctcaagtaacttggctgacttaaaattttgtgctagttgaatagcaaattgtatgtttgttgagctagcaggagaaacattacatgtttttaagacgtgaataggaccattaccaaatgaaaaaggaactgaagatagatctggaggagcatcagttgcagtttgagctgtagtaaaatatatcggagctacaaaatcgtaaataccaggtttaacatgacctactgcataaatagaataagagcttattctcaaactagtattgtttacacgtgatatataaccataccagcacattgggtgacgatagacaaattgatccgcatactcagctgttctagaaacctcttttcctcggcgcagagtaattcgagtcggagaatatgttccattctgataatacaccgcatcgatagatactattccattgatagctgcaactaaataattttccctattttccgcttcacttgcatttttattatataattttaatccgtactccccctcttgacttcctgggaatgggaataaaaaactctgccattgtgcactgtttttactacaataatctacaacattattaacacctacagccgctccataggtattaccactactactaagtgacatatatgattgaggaggtgttaattcacctatataccccgttccattatctggaataacaagtgcttttgttaggagagggaaaaacagtgacaatacaaaaagactgattttaatagttatcgttttcaattttcaccaccgaccataatgacaaatagaaccatctatatatactatttattatatgactattagtgatttttatctctaacaataagaattaaaataaaaataaagtaaagaaaaacattccaaaaaagaatcactctcgttatttttagcaaaataatatcttaagaattgttaacaaacatcattttaagatttttatcctacgttcttttttcactttccgtgcttcttccatttcacgcattctcaccttatagattgattgctctgaaaaaacttgtacacaaatgcgcttagaataaaaaataaagcagctattagcaatataaaaggtctatttttaattatctcttttagataatattagatattaaaataactcagtttaagaaagtctaaattagatatattaaaaatacattcagatattattaaataaataaacaaaaggtgtattatataatattgctttgttatttatcctctaaaaaggaataatgatatgaaaaaattattacttagccttactatgctggcgataatatctacgccagtgttggctaaatcccctgtagctaacttaaaaatcaacggtgatattaagccaccaacttgtactgttaatggggcgacacagcgtgatgttatttttgattacggagtcataagcccaacacttatccctcaatcgactgtctactcttattctgacattggagttcaaaatacagttacgattgaatgtgatgcaaaaacatatttaacatttactgcatctgacacttatgctgatacagaattaagtgttaataatacatcaggctggtttcatttagttgataaagcaaatcctgaaaccgcggttggtgcggctttcttcgcatgggataatgtgactgtcgatagcaaacctgcgtatatttcacgagcaaacgatgtgtctattacaggaaccagctacaataacgccctatacaaagggccaaccaatggttggacatcagaaaaacaaacaagcgttgataaaaacgccctggctctaatttcaggtgaaattttccaagcaagttttagacaaggaatgacaatgagtacttttattttatctagagatgaattaagtaaaaaaggaatagatttatctaatggtttagattttatgggagaagctgttctcacttttaactttggtgtctaattttaaagtaattgataatcacaatatcattaatttttatattgtgattatcttttacgttaaaaatttaacagtacttaacagtacttagcgcgctatcaatgttctgaatatcaaattagtacatcattcaatcaggaacgatacatcaatacttcctttataagtattcgtaggtatatttccattggcacaaaggttgaatgataatgacttataaacagttcccccattatattttcccaaagattgtcctgcataaaactctaaggcctcggcagaattgttattacatactgcattagttatttttttagctgcatcagataccgtgatataaggtgcgacttctttatctttcaaagggatattgggagacattgtcatccccgttttacttgcattgactagctcattatagggttttaatgtcacgtacatatttcctgaatgagggcaagagacaagcatactagcgacactttgctcaagtaacttggctgacttaaaattttgtgctagttgagcggcaaattgtatatttgttgagctagcaggagaaacattacatgtttttaagacgtgaataggaccattaccaaatgaaaaaggaactgaagatagatctggattagccccgcctgaggttgctgtttgagctgtagtaaaatatattggagctacaaaatcgtaaataccgggtttaacatggcctactgcataaatagaataagagcttattctcaagctagtattacttacacgtgataaattaccataccagcacattgggtgacgatagacaaattgattagaatattcctctgttctagaaatttcttttcctcgacgcagggtaattcttgtcggggaaggtaatccattctgataatacaacgcatcgatagatactattccattgatagctgcaactaaataattttccctattttcctcttcacttacgtttttattatataattttaatccgtactccccctcttgacttcctgggaatgggaataaaaaattctgccattgcgcactgtttttactacaataatctacaacattattaacacctacagccgctccatagtaattaccactactacgaagtgacatatatgattgaggaggcgttaattcacctatataccccgttccattatctggaataacaagtgcttttgttaggagagggaaaaacagtgacaaaacaaaaagactgattttaatagttatcgttttcaattttcaccaccaagcataatgacagatagaaccatctatatattatttattatatgattattattgatttttatctctaacaataagaataaaaatcattattccatataaaaactaaaataaaaacaaagtaaagaaaagcattctaaaaaagaatcattcccgctatttttagtaagataatattttcaataactgttaacaaacatcattttaagattttctcctgcgttcttttttcactttctatgcttattccatttcacgtattctcaccttatagcttgattgctctgacaataatctgcacacaaatgcacttgaaaaaaaataaaatagctattagcgatataaaaggtctatttttaattatctcttttagataatattagacattaaaataaactcagtttaagaaagtctaaattagatatattaaaaatatattcagatatcattaaataaataaacaaaaggtgtaatatataatattgctttgttatttatcctctaaaaaggaataatgatatgaaaaaattattacttagccttactatgctggcgataatatctacgccagtgttggctaaatcccctgtagctaacttaaaaatcaacggtgatattaagcccccaacttgtactattaatggagcaacacaaagtgatgtaattttcgattacggagtcataagcccaacacttatccctcaatcgaaaatttattcttatcctgccagtatggttcaaaatacagttacagttgaatgtgatgcaaaaacatatttaacctttgttgcgtctgatacttatgataatacagaattaagcgttaataatacgtcagactggtttcatttagtagataaagcaaatcctgaaactgcggttggagcagcttattttgtatgggataatgtgactgttgatggcaaacctgcgtatatttcacgagcaaacgatgctgctatcacagggactaactactataatgtcctatataaagggccaaccaatggttggacatcaaaacaacagacagaatcggttgataaaggctctctggctctaatttcaggtgaaattttccaagcaaatttcagacagggaattgaaagtaatcctactcaaacctttattttatctagagatgaattaagtaaaaaaggaatagatttatctaatggtttagattttatcggggaggctgttctcacttttaattttggtgtctaattttaaagtaattgataatcacaatataattaaaatttatattgtgattatcttttgctatcaataagaacccctcaaaatttaatataattaaggacttctcatataacataaaattatttttgtatttcttttaaataatcagcaacacgatattcaatatttttacgctcaatgtcagataaagaataaaacatagcgacattattcacatcataatttaatagtaaaccataataatatgcttctttcacatcacctttgagtagaagtgcttcataaagtttgtcaaaagaagatattgcaaaattcatttttcctaatcgaatattcatatctaaaatataatcgttatgattttttagtgtagataaatacacattcacgaaaggatccttacttatgtattttggtgcattagtatacatattatttaattcagaatacaaaaaatcatttatttcatatggataatctaacgataattgataccactcaatagccttatcaaggtttcgttcaactaaacacggtgactctaaataataatcagcaatgatactaatactagaatatttgtattcattagaagagctgtatttactaggttcttctcctgttgttagccattctttaagatagtagtctgctttattgatattatctttatcttcacagatattttgcatatagtaccaataaattaactcagccgcttctttatttcctaaatcatatgcttttttggcataaattaaacttcttccactatcttcaatactataaaatcttgctaattctagttgttgtttactactctctttttggtttagtaaataatcaagtgtattatctcttttttccttccatcttctatctatttcatatttttctgattctaattcaaagttagacgaattgatgctaatacgtcgttcatattcagatgctttagcaatgttctttctaaccccctctttaccgtctcgataaattatagccaattcttttaagcaaataaaatcacctaaatctgcacattttcttcgccaagccaaacgctccttaatagtgatattagttaacttatcaaaagaatagtcttgataaatttcatcgcgagcattcttatctttatactcttttgtaataataaatttaattgcatcaatagaacctatttcagctaatttaaatatatccttataatatttttttaaattatcttcattaatattgttagctgagttctcatgtattatattctttattgtatattgaaatgcaagatttgtattttgacttaataatggttgaatagcctttcttattttatcatcatatagcgaacgttccacaataaaatcaattacatactgtgaatccattccatatcggaaaagaatactatatccttcctgtcgttttttttctgtcaaccttctgctttctaaatcatctttcaattctgaaacaatattaataagagcttgatcatctattatatttttatatttaatagtcgcaattgcttgatgaaaagtagcttcataggcataacctcgtgctttttgatataatgaaaaagcatattcttcattattggcgacatcttcttctaaaagaagatctgcataaaaatgagctaagctatagttttgattaaatgtaccagctgatttatttttaattacactctctcttaaaatattcacaatctcttcttttttaagataatcagaagcaccaaaatcaaaatatatttttactaattctctttggcttttacctgtcaatttatcattagttatgttttcttgcagaaaactaactgcttttctaatattctgatgaaccctctcactattagaatataatttagccaataataatttactttcaggagatggctgtatgttatatgctctctctaccagcttaagtgctttttcaaaattataaaaactactatttggttttaaatagacattagcgagcgctagcatggcttgtggagagtttggatatttcaataataatgtattaatatatttttcaagcaagtttctaaaataatttgatgataatgtatcactattatttaatttctctattattttaattaatccatcatgatgcgctaaatcagcagatttttttaaatatatattagctaaaaaagaattttcttgaaggggatagtttttcttatcacccttgtagatttgatacagaagatatgttgcctcaggatagttcaaatatgctgaatcaaaaagtaagttaatatcttgacttattaacttatattttaaatacatcattttaggatctttttcttcaataaaaggacgtatcatatttttagtctttcttgattgttttactgaatccttattctctaaatattgatatacagcttctttattgccttcttctgctaatttttctaattcttcaagtgttctttttttttcagaccaagattgctcaccataaatagggagtagcgtatattctttttaatcataataaatcacaggaaaattaaggtcatgtaaaaaatctttcgctattgaagagcctaaatcagcagctttagttaatgacgttaatccttgagcatcatcagtaggactttggattaatcctttgttacgtaaatatcctaaattataaagtgcatttttattttgtaaatttgctgattttattaaccatttttgtgaagctaaggcatttttatcaacccctatgccatcccaatacatcattgctaaactaaatgctgcttgcggatcactttccgcatgttgtgaaaaataattaaacgcctctttatagtcacctttttgataatagctataaccatttggctttgactgtggttggatttgatttttattgagataaaaccccaaggccataaatactaaaaaaatggagataagtatatttttaattttacgagacataatattccttttaaagctcattctttttatataaatatagcacaatagtaaaaattaaaatcaatataattgctattcttttatttatatttttatattaatttatttagatttgctataaaaattgattgacattcaatactccactctataatcagccctcgttgtgtcgtattattcagcagcttgggtagccaagggattttgttagtcctcaataaaaaactaatagaggtcagcgattgttatggacattaatcaagatattagacgtttaggtgaaaatctgaaagggcgtttggcgcctgatattgttgattttgacttagaatatatagaccactcagaaagtattttagcttttgaaacgttatgcgatcacatagctgactatgatgtcgtaataaccagtgatgagtataagcagatcattggtattgtaaataagctaaatcttgagttagatgatagatatttatatataaatccagataatattaagtgaattagggtcaatgaaaagatcctagttcaatactaggatcttttgtatttatctcatcccttcagccacttaccgataatagtgagttgtgggctggggttgggtttaccgttgttcggtaagtaacccactgtatagtgtctggttttaccccccctcttctttagctgtctagctttttgccttacaactgcgcactaatgccaaccatcgaaaagcgaaacccacaccgacagccaccagtcgcaaggcagtaccttatttaccgatatgaagaccgcagactgagtaatagaaatggtatagctgcaaatcaagataaaatatctacttttatggttgaaagcgatactcgaatagtccttaatcatggttcgtctacaaatataaatagagttatctataaagaacaaatattaataaataattaacttaccatcatcaaaacaataacaatttaatttttaaaattactctacacttactctaaaaaagataaaaattatttttatctttagtaatatctatgataattggatagctacagtttaaaaatagaataaatataaaataacaatcactttaagaatatcttaattagataaattaaaaatatatcaatttgtaattaaataaaattatagattgtgtattatagagtattatttatatttttaaatttataaaaaggaatggctatatgaaaaaattgctatttagtcttgctacgctgattgtaatgtcaacaccagcattagctactccaccaggcgctaacttaaaaataaacggtgatattactccccctacttgcaccgttaatgctggtgataatgatattattattgattatggtgtaatatccccctcttttattcctgctgaggaaaattacgcactaggagctaagagtgccaatatcaaaatatcctgtgacgcaagcaattatttaacacttaaggtatcagatacttataaaacaagttcaacagattcagcgaaaattagcgtttttggattagttaatgcaaaaaatacagaacaagagattggtggatatataattgatgtcattgatatcaaagttgataataaacgagcttatttaggaagagtggcagataagatttggactggatcgtctgcaactatttttaaagataccttaacagcgttaactagtgaacctcaagcccaggttgataaaaacaatttaaaacttatagctggaaaagtgtttaatgcaaaaatacaaataggagcttataacgaaagtaggtatgcgtatattttatcaagaaaaaaattggcacaaaacaatatcgatttaactgatggaattgattatataggtgaagctgtttttacttttaactttggtgtctaaatttcaaaatcattgataatcacaatataaatatatgttaatttttattgtgattatcttgtgttatcaacttatctataatgctgtgtactgatcgtgctgatacctaaaaaccgccaatcaacccttcagctaaacttaatcacatgccaataagagagtaattactataacgataacaaaaaaagaatccccctctttcgtcaaaagcgtgaggaaatatctctattttcgttaatccaaactctgcactctaactatttttattaatataaattatcagtattaatacttaaaatatgacacaacaaccaaaaataattaactttaaaaaatatcttttagcgaattattttcaataaaaacaaaacacaaacatatctatatatcacatcaataaaaataagccttccccttaaagttagagactaaatagctataataatcaactatattatttaattactgctacgattattttagtaataaaaacgcctaattgtgatagtgattggaagaaataataagaaagttatctatactaaactaatatcaaattttaagtatcaaaatattaaaggagtttgacgaaatgatacgatgtgttcgcttatggaccggagaagatggtaactctttatttgaagaaggtatcatcgaatttaaggatagttcacgaggcgatagtgaaagtttgccaattgctgtttcagagttatcgtttagagaaacaacttcaggtggttcatatgattggcatcaagatcccgttcctcgttatgttattacgttatcaggaacattagagtttgaaacaaaagatggctcaacttttatcattaaacccggtgatgtgttgttagcgcaagataacagtggcactggtcataaatggcgtcttatggatgatgaaccttggcgacgagcttatgttgtttacaaagaagatgcaggattatgttttaaaccgaccaaaacaactaagtaattggggtctgtatgaataaaactattagtgaacatgtagatgtcgcgctcattggtgctggcattatgagtgcaacacttggcacacttcttaaagaactagagtctaatttaaaagtcgcgatgtttgaaagacttaatgattgtggtcaagaaagctctaactcatggaataacgcgggaacaggacatgctgctaactgtgagctaaattatacgccaccaaatcctgacggcaccgttaatatcagtaaagcgttagaagtgaacaccgagttcgatttatcgcgccaattatggtcttatttagtaacaaaaggaaaaattgccgatccgcgtgattttattcatgcttgccctcatatgagttttgtttggggtgcagataacgttaaattccttcatcaacgctatcgccaaatgtctgccaatcactgttatgaaaatatgcaatacagtgaagacaaacagcaaattgaagattgggcgccattaattatggaagggcgtgatccgaatcaacagcttgctgtcacccgagtagctactggtactgatgtcgattatggcgcattaacacatctattagttaagcaactttctcaacaagataattttgagttgcactataaacatgatgttattgatatcaaaagaaatgagactggcggttggaatatcgaagttaaagatctcaccacccatgataaatacctaattacagctaaatatgtatttgttggtgccggtggacgcgctatcgatttactccaaaaatcaggtattccagaaggtaaaggctacggtggtttccctgttagtggtatttggctgcgttgtgatgaagataaaatcagctctcgccatcatgccaaagtttatggaaaagcagatgtaggctcaccaccgatgtctgtcccccatcttgatactcgtattattgcaggtaaacgctccctactctttggcccttatgctggtttttcaagtaaatttttaaaacacggctcctatttagatttatttgagtcaattcgccccagcaatattgaacctatgctagatgtcgcgaaagataactggtcattaactgaatatttaattggtcaagtattacaaacgtcagcacatcaatttgaaatgcttaaacagttctatcctcaggctcaacatgaggattggcaagaagctgttgcaggtcaacgagtgcagattattaaacccgcagctaaacatcatggcgtattagagtttggtactgagctaattagtagcgcagataaatcattttcagtgttattgggggcatcacctggcgcttctacagcagcatttattgccatcaatatcattaaatcttgctttaaacagcaacttgaaaatgagggttgggaagatcgtcttaaaacgattattccaacttatggtattgatctcaaaatagatgccgatgcttgtcgtaatattcgtgcatcaacggctaagatattaaaattagaaacaccttagttatatcttaccgataaaaataaaacagaccggaaattaaaggtctgttttattttttatttgcatcgttattattaattacccttttccaagtaaatatacttagaaaaattacatcatttctacaatagtgataccaccaataatagaaagtaatgaacatagcgtacttaataatacagtgcccgttgccatatcagcataggccttatttgtaatagctaaagcaggcaccgctgttgcagtaggcaatacaccaattagaaagacggcttttaataattcagtttctaatccaagtgcaaatcccgttcctaaaattaatgccccttgtacaacattctttattatcacattaaaaacaatttcagtattaactttgagtttgagccctgaaattaatagtcctaagaaaaataatgctacaccaccagatgttttccctatttcattcactgagttttgtaaaatctctggtagcttaacgccgaaaatagctagcatagcccccaaaataggcaggaaaactaatggctgagagatagcattaagcaatgactgtaaaatgctttttccttgtttggcaccactaatgatcatgatagtaaaaggtaaaataattaccgtgtagatcaaatttcccaccaccatagcaatcaaaccagatgagccgactgttgccagtaatactggtggtccacaataagccatatcaggaaatgaaaccgataatgcctgcattgctgagttctttttatcatgtttaaaaaagaacttgccgcctaaaaaaccaataagataagaaacaattaatcctaccgcgagagctaatagatagtcgatattaaagaaaaccgacggagaagcttgggttgccgctaaaaagagtgaaaaaggcagagcaattttaacgacaaaatcagcaaaggcttgtgaatactctcttttaataaatccatatttaccggaaagccagccaactaaaagccctaagataatagggcccagcgctgctaaaatggtttgtagtaacatattacctctggttgcttaatatagtgtccccactttattcaatggctataactgataacaaaatagttatctattatatgaataaagtaaaaatattcgtattattacctagtaataaaaattagaacattttaattatcggatatatttaaaatcattcaaatgataaataacaatattacttcacaatgatcaacaggatactttatcgagtaaactaaacagggaagtaaaccaacacggcaattaggattttaagtatttttacttaaaataaacctaacaatggtaataaacagataataaaagaatagtttttgaataaaaaataaaataggtagcaataaattaaaccatatggaaatgattaatcgagcttattttaatatatatgacaatgctatattgcatttttcagcctaaggacactgtttaggcacatcatttagctgttgatgctgttgctcaaagagcacttttttcttatctgcttctttgattatttttaatatatagatactatcaaaatcaccactttcccatttaggaatagcttttggatcaccaccaaattgcgccataatatcccttactactttaactaaattatcatgctcccaagcaataaaaatgactgaattctgatattcttcactcagcagtttattacgtaatgggtctatctctttggcatggtaatttaaatggattggcagtgatgttttcaccgcaagaggtgttaaagtttgaagagagcgtaatgaatttccaagtttattttgttttggtgctgcagcaaataacgcatcaggctgaccaaattgtgttatcaatcgattaggtagtgctagcgcacgatttaatccctgacaacttaattgtccgctatcattatcaggcttttcaccatgacggataaataccagcgtttgttctgaataagccataagattaaatccatataaaatgaggctcaaaaagataatgatatagcgcatataacactccttttgagccgtttgatttttagccaaagattttggttagatgtgctttatattctacaatatctttctcaatattaggctctttaatgacgttgttggtcataaaagtaggcagctgagataaaccaagaaattgttgtgatttatgaaaagcaaaatagacaccatcaacccctcgcccatcaaagaaattaccaaattcattgaaagcttcaataggggcattccaagtcacggagatcatatattgcttaccttgcaacaatcccccgctaccatattgtttgcttggatcatgacgagtacgtccatcgttttcatatagtttgccgtgaccataagtatagacttcatccatatactttttcactttccatggcatcatcatccaccagcccggcatctgataaataatagtatcagcccagataaatttctctatctcttcattgatatcatagccttcttcaatttgtgtttcttttacctgatgccctaatgtcgccaaatgtgccagagcgatatcatgtaatgtacggtttaattgtcctgcagaatgcccaaatttttgtccaccgttaataagtagaatattcatatttactcctaattttcttactactaaatatttaatatgagctattttaacagaaaataaacggatgcacttcagggcaaaaaatcaccaaaaagaaacactacagtattaatcacttttatcgaaacagaataaaccaacaataagttaaaaatgctaaaaaagcagccattaatcactgtgtatttcaataaagtggattattgcttttatcgcaaaagtctattgtttattgtctactttattgcctaaattgagttaattaacgataacgctggtggatactagtgacttactcctagtttatttataaatcaaaaagtatgctcttactgattgttgtttaagatccttgtcagcataaacatctcaatattgtatgaaattgcgactcataatgaatcgctttttgatttaatcgctgttcaacactgctaatcacaatcaccatacagatgctttttatgaacaacatggctatttttcactctgagcataaaataacctcaaatgttaaatcctaaaacattgctaacataacttatgagattatttatcaacgataaagatttttatcagctgatcttgctttttatgggcgttattttcaatctctcggactttgtaagcgatcgtacttaacgcgatttcaaataaacaagcgtcaaagtctgtagaaaaaacaagcagcaaaaacagaataaacctgatagttaagtggcagaaattttcgctacttacacccgataacaaagaaataataataagcggaaaaacagataagtgagtgaaaatgatatgctgacaattttctagtgtatgtattatttcctctttgttaataccctaacaatagtcgttttagtcacaattaaaaatagagagtaataataagacatccctttttttggtatatatgacgattttttattaacaaaaaagcagatctcgatcactattttaactttagctatatttactagccgttcaatatttacagcatttttatctaatcacttgtttaaatattaattatcacactgatttgtaatacaaataatttacctattatactagtaatatcataatgtaacataaaaaagaacttcatcactgatagtaaagtgtcaactaaacaatttgtataatattatcttttctttatgaattttgaatgactaatatatctaacattaatcatattcttatttattggaacaaagtaatataaaataaattagcgtttattttttatcatctttattttccacaaaaaaataaataaaaaatcttaaaataaaaaaacttttaaaattaaaaataaaaagaattaatctctatataaatttaaaaataaaacattattatttattaattataatgaaagataaaatataaaaaataattaatatcaataatgaatatattaaatggtaacgcactttggtttataaaactgatttttacaacacagacaaaaaacattagaaaaatttatgattttatagacattgaatgagctggataccaatgaaaaaagctaagttaggctttaatgtatcgaacaagttaccagtataagtaataaaaaactctatttttactatcaaaaatcatcttgataacaataacaataaattaattacattgataaaagtcaaaaaacaagacaaatactaactagttagtaacaaaaatagattttttttatatttgtcacacaattgattttattctattacatctttctaaatttttcctacaatagcccacaacctaacctgacaatagtttaagtaacgaatgcttatattgtttctttaggtaactatctttttttctttatgatttatcgtttcagcaaaatagaaaaccatcaaactaagtgccctacacaaaacataaatgacgaatgaataggtttgccggtgcagtgataaacgataaaaaattgcaaacttaaggataaaaataattatgtcagactatctatcatttttactgggaattgttcctttagccgttctgatttttatgattttaaaaatgaaatcggccgttcatcacgctgtcctcgtttcgctaattatcactgtggctctcgctatttttcattggaataacacccttcaatttgcctctgtatctgtactttatggtgcggtaaaggggttatggccgattatcatcgttattctggcggctatttacagctataacctaatgctaaaaacagggggaatggaggtattaaaagacgtattagcggggatcagcgatgataaacgcgtacaagttttacttatctcttggtgttttggcggttttttagaagcagttgcaggttatggtacagcagttgctattcctatcggtattttaatcgcactaggttttgatccctttaaagcagccgtcgcttcactagtcgcaaatacggtacctaccgcatttggtgccgttggtattccagtgtctattttggcacaaaataccggccttgatgtattggtgttaagtaaaaccattattatccaacttggtttattcaatattctattaccttttgtcattgttgctattgctggtggtggtattaaagccattaaaggtgtcggctttattactttaatgtgtgggatcagcaccttaatccctcaatatattgtcgcagctaatttaggtgcggaattacctgcctttgcaggaagcctagtcagtctgattgtggttattttcttggctaaacgcatgaaaacaggccatgataaaagtaaacagccaacaaaacactcagctaaagagctattagtcgctagctctatctatctgtttacttttatttttatcttagcctgctctccgctattccctacaatccaaaccgcagtaggaactattgcaactaaaattccttttgtattaagtgatactcaaactgaatatcaaactattgcttggttaagtacgcctggggtattgattattttagcgagttttgttggtggcactattcaaggtgcaagcctttcaacgctcttttctgtattagtaaaaaccacaattcaattaaagaactccattattgccattatggctattgttgcgatggcaacggtaatggatttcagtggcatgattggtagcattgcggaaacattagttaactttactggcgctggatttatctttattgccccagtcattggtgcactaggaacgtttgtaaccggaagcgatacaaactctaacgtactatttggcaagcttcaaaccagtgcagcggcaaaactccatgttgatccctttattctcgcagcggctaatacctctggggcgactggcggtaagatgatttcaccacaaagcatcgcgatcgccgtttcggcgaccaaaatggatgggcaaagcagtgccattatgcgagaaacattaaaatattgtattgcctatatcatcatcctaggtgccaaaatcggcattatttatcacctaatgaattaactatacaagataagtggtggcttatcttggctatcacctatcgctttgacataacgaaaataaagaaaaataaccaataagaattttatcttaaataaaaatgacaacatctgagcgatgttttggagttcggtgaatgaaagttaatttttatgcaacctgtcttggtgatgtgctaaaagcagattcggcacgagataccgtattattgctcgaaaaattaggttgcgaagtattatttcaagagcgccagggttgctgtggtcagccagcacttaatagcggttatgttaatgatgcaaaacccgcaatgaaatcattaattgagacattagaagttaatgattatccgattatttcccctgcaggctcatgcacttatgcgattaaaggctatcccagctatcttgccgatgagcctcaatgggcgcagcgagcccaaggtgtggccgatcgtttaattgatcttaccagctttatcgtcaacaccttaggtgtggttgatgttggcgcccgccttgcgggtaaagcggtttatcatccctcttgtagtttaacgcgaaagttaggggttgttagtgaacctttaaccttattaaaacatgttgaaggactcgaaatgttacctttcgccaattcagaaacttgttgtggttttggcggcaccttctcagtaaaaatgtcagaaatttccggtgaaatggtcactgaaaaagtaaaacatatcatggaagtcagccctgattacgtcattggtgcagataccagttgtttaattaatattcaaggccgtttaagtcgtgaaaagcgtcctgtcaaagtgctgcatattgcacaagttttaatgagtcaataagggggctgcaatgtctattaaaaccagtaatatcgattttagaccacgcttagcgcatgaaatgaatgataccattatgcgtaacgccgttgttatggcacaagagcgcattggagccaatcgccaaataatggtaaaagagttaggtgattgggaagcgtggcgtgatcgtgcagaacaaatccgtaaccatgttcttgaaaacttagacgcttatctttatcaattatcagaaaaagtgactgaaaatggcggtcatgtctattttgccaaaacagcagaagatgcgacacgctatatttgtaacgttgccaaacagaaaaatgccaagaaaatcgtcaaatcaaaatcgatggtaaccgaagaaatcggtatgaacaaagccttacaaaatgaaggtattgagattatcgaaaccgaccttggtgaatatattctgcaactggataacgatcccccttctcatattgttgtgccggcgatccataaagatcgctaccaaatacgtaaagtactaaatgaaaaactaggttatcaaggtagtgaaacccctgaagatatgaccctttttatcaggcaacgtattcgacaagattttctttctgctgatattggagtcacaggttgtaactttgcggttgcagaaacgggctctgtctgtttagtaactaacgaaggtaatgcacggatgacgaccacattacctaaaacccatattgccgttatggggatggaacgtgttgcgcctacttttgaagaagtcgatccactgatcacgatgttatgtcgtagtgcggttggctcacgcctaaccagttataacacttgggtaactggacctcgtgaagcgggtaatgttgatggccctgaagaatttcatttagtgattgtcgataatggtcgctctgaaattttaggctcacaatttaaagatattctacgctgtatccgttgtggagcctgtctaaacacctgtcctgcttatcgtaatatcggtggtcatgcttatggctctatttatcccggccctatcggtgcggttatttcgccactcttaggaggctataaagattttcatgacttaccttacgcctgctcattatgcaatgcatgtaatgtggtctgtccggtcaaaatccctttagcacaattgatccttaaacatcgtcgagtcatggcggaaagtggtttaacaccaaaagctgagcgtcgtgtaaccggtatgtttaattacattaatgcgcaccccacgctttggaaagttggcatgaatgtaggggctaagatggcgggcttgatgatcaaaaatggctcaactccaatcaagataagtgtactcaatgattggatggcatcacgtgatctcccaaaacccgatggttatagtttccgtagttggtttaagcgccacaaagcagaaggaaaaaaataatatgttaaacgaacaaaatcgtgctgagtttctgcaaactattgctcaaaaattaggacgtgaggtgacgcatacgccaaaaccacaagatccccctattaataatttagctaaaacacgcttaacaaatttaacccaagatgaattatgcaaagaatttactgattttgcacaaacccagcaagtaagatgcgttatcactaaaccagaacaagtgataaatagcttaatagcgctttgtgaaagctatgattgtcaaggttcagtgataataagtggtgatgagcgcttaaatgcacttggtgtaacacaagctattagtgaaaaatatgaaacttatatttgggatcctaaactcggtcatgaaaatattattcatgctgagcgctctcaaatagggattgtctttgcggaagcgggattaacagaatctggcgggattgtgctgttttcttctccggaaaaagggcgttctgtcagcctgttacctgaaacctcgattgttattttacgcaaaagtgacattttaccgcgagtggctcaacttgcagagcgtttacacaaaatggcacaagatgggatcagaatgccttcatgtatcaatttaattggtggtgcaagctcaacggctgatattgaattaatcaaagtatggggagttcatggtccagttcatgccgcttatcttattattgaagattgttagtttaaacgaaacaatataaaaacgataaccaaataacttaacgtcatggtcaacggattgacccaaatacaaaacaccttttatacaggtgttttgtatttatggcttaattagtgagtaataatttagctcgccattgatttaattttatttcacaagccagcagtacttcatcagcaccattgccccccatcattaaagcagattgacgttggcattcactacttctaaaaagaataaactgctcttgtgaactgactaatgcatcaatagcacttttagccgcgatagagtcactatcttcaaggtcgcctttgcttttattatagataacattcaactgctcttcagataatcttagttcatctaatagacaagctttaatggttgtttggcttgcatctgttgacaactcataacatttggtcaggggatcgtgatttacttgagcaaaggaggaaaaagagatcaaactcattgtgagtaaactgtaagaaattaaaagcgtacctatcttcacgttggctcccaataataaattttttactaaatttgactgtcaaatataaggtattaaagaattaacaccacatctattagtgcgaaaacacaaatttaggatatgtcgcattaagtgtagaaaataaatcttaataagaagtaaaactataattaataagtctttaaatctatctattttattagtattttttataaaaaaagtgttttaataataatcttagtaagcgttatatttatctattgagaggataatatacaaaacatcaggtttagtgtttttttctcgatttaagtcaattttttttgatcctccgaagttctatttttagcaatagaagcaaaaaaatagactttttttacttgatgtcaatagccaaacaaagcgttttgcagtaatctcatcgctgattttttgctactttcaccctttaaaacctctggtggtatgacaaatatgttgtataaatttacccccattattctgctgataatttccaatatctttatgacttttgcttggtatggccatttaaagtacggtaacaagccgttaattatagtgatcttactcagttggttaatcgcttttgttgaatactgttttgcagttcctgcaaaccgtatcggccacaactattacagcgcagccgaattaaaaaccattcaagaagtcatcacactaaccatttttgctgttttttcggtgacttatttaggtgaaagtttcacacttaaccactttatcggttttattttaattggtgcgggtgcgctatttatttttaaggggccattttaaagaataaaaaatagctgctgataaaataaatgaaaattttcaaaacctcatttcgaaatgaggttttttgttttgtagagcctcgtatcagtcgaacaaaaaacaatcaaaataattgattgctattattaagtactaaccagtaattcatagcaagattaagttatatcattcaataaattaccacatcccatattatgcactgcattagtagaaatttgactacaaaaagcaaatattgctcttgaaaaaatattttcattcagcgcataatagctagctaagagaggcattgtttctctttctttctttgttgcttctcttaagtgaaaacgattttcaaaaacttcttatattactttaaggtcagataaaacggtatctggtatgagcaaacattctaacgattttatttatatgcaggataatccctgtatgcattgtggtgcatgttgcgcctattttagagtctctttctattgggctgaaatgaaaagtggtggtggtgttgttcctgacgaatttaccgaacccttaaccccttttctatcatgtatgaaaggaactaatgagaaacaaccacgctgtgaaaaattgattggtgaagttggtgaatgcgtgagttgtgcaatttatgaacagagaccatccccttgccgtgagtttgaacaatcttgggctaatggcgtaaaaaatgaagcttgcgatcgggcaagagccgcttttgggcttcctcctcttcctaatatttctctaccgcattctgcgtagaacatcagaggggctagcccctcctgagtctctttgatcacaattttgcacttctttgcacaaaataaagaattttcactaaaaatagcattataaaataataggttagtttgactttatttataaatcatctagtatagagagtaatcaattaataacgtgtatttagtgaggttttttatttaaaaatagcaataaattaggaggtcactatgatcagtagctcatttttcattcttttcctttcccttatttgttccgttgccgttgtcagtatgttactcggtggcttagaggactaattatgaatatttctgatgaaaatattctcccccagaaatagacgcccataccaaaataattatttttagtatgggcgtctattaatattatattaattaactttctttttattttgctattactcgttattagtaaatatttttatattctatttaaatctaattttaataactgtaatgaccggttattttccacgaaaataaaacatcttcagcgacttgtccaaaaccaatattatgcatcactaaatagcgctgattatcactgcttttcttgtctatgacgagaccaatatgaggacgtccattatctaagcgccagctaacaatatcaccaggcaagtagtctgacgcctctttgctaataggtttcacctttcccttgcgcgagaaaaaaacttccaaattgggtactctgcggtgatcaatattagtatcaggtcgactaagtccccagatacgtttacttgggtaaagtgcaaaattggctttgatatcttcatgtaacaatttttgtaaatcaatgccaattcctcggtaactacgaataatcacatcactacacaccccataatgagcaggcacatcaccattaggataattaattttacggtaggctggatcataaataacggctctaggtagatccgttgcataagccaccagctgtttattttgtgtcggtgttatcgcttgggaaacagaaatgggtaagataatcagagagataaagctaaatatgaatattttcaaagaattatttccatgttgtatcaatcgatgataattaaaatcatctttatttaatgactttatcatttgctaaatagtggggtaaaaatatgagaaggatcttaattaaccatgacgcatcaataaaaaaaaccgagttactcttaaaagcaactcggttgatatcaaagaatgaaagtgtttaacgcaattagttaagcacaatatggcttttgcgtcgtaaactggcaaataacatatatacagctgtcactaataacacgacaaagaaaaagttcataatgccgttacttgcttgtgacataaacataccagcgcctaatggccccattgctgaacccacgctgtaacttaatagcatcacctgagtaattgccacaatatagctcgcattaacatgatcacaagctaatgtgatagcaataggataaagtgcaaaagatgacattcctaataaagctaatgcaataattaacaccacatagtcattagacagataagtcatgcccatcgcaaataccccaactaagcacatcatggctaataatagggttttactcatcatcaccgacaatttgctaataataggctgaacaaccataccacctaaaataattgctgccatcaacaccccaatttggtcggtgttaaattgcccttgatttaaagccaatggcatcatgccataaatactccccatcacaacgccagaaaccatacagcctactaaagaagctttattcagccggctaatctgtttaagtgacaaacttttatgctcgtggcattggggttgtccttgtttaaaaaacaaaggaggtaacactgcaattaatagcaatgccaataccgcaataaaaggaattgccccttgcgtaccaatggcaccaatagcaagctgacctaatgttgtgccaccataaagtgatgtcatataaaagcccaagcgtttagctcgctctttaggattatcaccaattaataaccatgattcgactacaacaaagatacccgcaaccgccataccaccgaaaaagcgagatactagccataccgataaataaggtaacagtggcaaaatactcacggtgaatgctaacaacaataaaaacagcacaaaagagagcctatgccctatttttgcaataataggttcgatcatcactgaacctatgagtaatccaataaagtaaatgcttgctaaccagctagcataaaaagtatcaataccaaaactatccatagatagtggaattaaactcattaaatagcctgatgcgatagcaaataccgttaaacccgcgacaggtactaatgtactgtcacctttgcgtaccaaagtagtgttctgtttcactaccctcgtctccacaatcaaaacggttaatcatgcgctgttttctcgaagccagacattggcactcctttcatctagaaaagatgaaagcaatagtgatgaaaacagtgggtggcgtccctaagttaggggtgcgtgaatatagctcgttactaaaaataaataaaattataaaatctaatgctagcgagtaattttatttatcctatccgttattatcgtcctttcacggtaaaaaagtagtccttgacgcaaattattttttaaaattgagaataatctatagtctttgtgataacagcgcacagagcagaatagcggctattttattaaataaaacagccgttaataacaacgcttattctgtactttgttctaaagcggttttgattgcatcagggattgaactgccatgtcctttccccgtaaagaggtaaaattggcatgttttgccggcatcagtaagataatcacagagttgtcgaggagtaagccagctactacgcgtttgatagcgcaagcgttgctcttcgctcatttgagaaaaatcaggggtttcttctaattcacctaatgtaattgtcaccgcaacattattggggatctgttgccatttatcttgagtgatccactcaccttttccccaccaaagagatgtgctagcggcaatatagcgttgaaaagcgtctggatgattaaataatacatatagcgtaaacacgccaccaaaggagtgtccaaacagtgattgctcagtaatagtgatgttttcttgtgccgtctgtgctagtacatagggttttaattggcttaccataaactgataaaactgttcaacattaccgcctttggcaaaggcttcgccatgtactcttggggtatagtcgtgagttctttccgctataaaataggccttttcacctacatagcctaggcttgcaataacaggcaatggctttttcgcttgcgctagtgcttcattcacaataagtggaaattgtgcatttccatcaacactatacagcactgttgtcttaggcgtatttttggggatcgcaagaaaaaagcgatactgctttccttgatgctcaacctctttttccataatgtgataataggttgatacttgtggtgtgagttgaggaacttgttgattaggtcttgcttgcacaatagaagataacattatcattccacataacattagtattctcatcaatcagatactctgtaagttattatcaaatgatggcagtaagccccataataaatgaggcttacctttattgagatagattaaaaactatatttgatatttgcccaataacgacggccttcatcaacgacccagttcccccctttatcgttgaccgcaggacccgtttcatcagtaatattcaatacggctaaatttagcatggtatttttattaaagttataggtcattcctaaatcaaaggttgtataaccactacgataacgagcgccagtataaccatttcgttgagccgcccaaatttgcttaccagtataggcagtattggcatagaaactggtagcttcatcgtattgccaatcaacacgcgcattggcgctatgttttggtgtcatatccaatggataaccttttaatgattcaccagagcctaatttttcgtcatcacttttacgcttagagttgatataagtgtaattagcacttactcgccaattatcagcgacagggaatgcaaccgcggtttcaatccctttaatattagctttacccacattatcatattggtacagttttaatccggtaataggatcgatttcacccgtatcgtagttggtaagcttatctttaaattctgtattaaagaaggtcacattggcggtaaaaccatcaccattgtcataaccaacaccaatttcttggctaaccgaagtttcaggttttaagtcacgattaccatacataatcgctcgccctttttccgttgatgtaccatattgagggctaatttctcgtaaactcggggctttaaaggccttagcaatccctcctttgatggtaaattcgtcggttaaatggtaaaccgcgtatgctcttgggttccagtgcttaccatagtattcatgatcatcaagacgtattcccccagttagggctaaattatctgtgacactaaattcatcttctaaaaataacgctttttgatcagcggtgatcgtagattgtttgacctctttaccaccgactgaagattcgtcttttaaacgtgcatattggtattgaccaccaaaagtcatcacattatcaggaaggaatgcggtaaatttagcatcgaaaacagtattagtgatttcagggcggcgatcttcataatatttgtagctatttcctgtcgctttatctacaccttccgtcttttgaacacgcttggtttgctcttgataaacacttaactcagagtgcaaaatatcaaactgatttttataagttaatgcccaatggttacggtcattattcgtttctaacattttgtttttatcaagacgtccaccacgattggtaaattcgctcatcgatttacccggtgttgtcgtgcgttgtagcgaattgcgcccagcttctaataaaatggtttggttatctgtaggagtaaaggctaatttggccgtaatatttttattatcgttacgcccttgcccatacgtaattttatcttctgcacgtaagtagctactaccataaagttgtaaacctaatttatcttcaattaatgggcctgaaagataaaaatcaccattgatagaatctcccgcgtcacggttatgttgcaatgttccccccatggaaactgcaccatgccactctttagtaacaggcttagtaataatattaatcacaccgcccatcgcatctgagccataaagtgatgacattggcccacgtattacctcgatccgttcaatggcatccgcaggaggaataaatccaccttcatatccaccactcccattagggcgtgattcacgactattttgacgtctgccatcaaccaaaatcagtgtgtattctccgggtaagccacgaatagtaatttcttgtttatttgcattaccattcacactgacgccttcaaccccttttacggcatcagcaagatcgtgtatcggttttttctctaattgttctttgttgattaccgtaatgctagcgggtgcatctgtttgttgctgtgcaaaccctgaggctgatacaactaatcgttctactttatcttcttgtgcatgtagtgaataagaagtcattaaaatacaggctgttaaagcacttattttaaatttcataacaaatccctgaagtcaaataatggttatagtaatgagaatgattaatattatcttaatcaattgactgtgagaataattttcttttgcaatttagtgatattttttaatctgcatcaaagcaatttagagcaacaaagataagaagatttgaataggcattgaagtgacaaaaaaagcagagctattggctctgcttttttttgtaatacattgataaataaaattaattactaattaccaaaatacagcataaagcacacagaggatgatcataatgatataagaagcaatattgaacccactttgggttttaaatgttgcatcagttaatacaatcgcccctacgctatcatcacttttcgttgaggttaagctgaccaaaccaataacaaccgcggtgaaaataaaggtatacatcatttggtcaaggaatggcattcctagtggcattaattttaggaataaagcaaaaggaattgagagtacaacccctataattgcccctttggcattagttttcttccaaaatagtcctaacaagaatacagctaagataccaggactcactaaacctgtgtactcttggatatattggaatgcctgatcaatgccccctaacagtggcgcaataaagcaagcaataatcaatgcaatcaccgcactaatacgtcccacattaactaagcgggtttctgaggattttggcccaatatattctttataaatatccatcgtgaaaatagtcgcgatagagttaagcatggaagctaaagaagaaacgatagctgctgccagtgctgcaaacacaacccctttagccccaataggtaagaattgtgttaaccaaggataggctttatccgcttgcgctaaggttgggatatgctcctgtgccattgttcctaatcctgccatcagcgtaggatcggttgtgataacaaaagctgcgatccccggcacaacaactaaaataggcacaatcagttttaagaaagcggcaaacactaaacctttttgcgcttcattaatagatttagcagctaaagcacgctgaataatgtattggttaaagccccagtaatagaggttagcaacccatagcccaccgattagcacagcaattcctggcaaattcataaattgtgggttttcttttgctaagatcattttaaagtgatctggcgcggcggctgtcatcttacttaagccttccattattcctccatcaccaccgatatagctaacagcaagtacggtcgtgaaaagtccaccgaggatcaggaagaaaacttgtacaacatccgtccatgcaaccgctgaaagtccaccgtaaagcgagtagataaccgcaaatagtgccagaccaataatggcatacatcatcggcacaccaagaatggtttctaacgccaatgatcctaaatacaatacagatgttaagttaacgaaaataaagagtgctaaccagaatacggcgaggatcgtctttaaattacgacttttaaaacgattctcaacaaattcaggaatggtataaatgcctttttcaataaaaataggtaaaaagtatttagcaacaatgattaacgtcaatgctgccatccattcataagatgcaatagcaagacctatcgaaaatcctgagccagacataccaatgaattgctcagctgagatattagcagcaataagagaagaaccaatcgcccaccaaggcagtgttttacccgcgaggaagtaatcctttgttccttttttagctccatcttttgaacgagaaacccataatccaaggctaataataatgatgacatagagggcaaagattgcataatctattgtgcttaatccaacaccttctgtatgcataatattttcctttcagacccatagagagaagagaatattaatgtaaacgtttccacttgctttttccgttactccgttcacaattttatcgcctatgttaaaaatcggatcgataaagcacataacaaacgattaccttaactaataaatcaacaaaattcgctgatttcactttatgctcttttaattgagaaaaaagtcatcgctaaaaataaacaaaatagagagagtttgataacggttacaataaataaccagataataataagaatatttttaagcgataaaacagataaaaaaggcgcttaaacaaactgttataaacttctgagcctattatcagaagtttgtaacatgtttaaagtataatggatgattaagaaaggtggcttaaattataaacggagttgcgctgaaccagagtgggtgagtaaatacgctgcttttgggttaggacttccccttgagaaagctttaacgctaatgttgctgcttgctctgccatcatatgtatcggataacgcaccgttgttagccgaggatgaatataacgagcaataagtacatcatcaaagccaatcactgaaattttttcaggaacagggatctcattttcatcaagcaccgataatgcccctgcagccataaagtcgttataggtgaccactgctgtaaaatctatcgacttggttaatagacgcatcatcgcttgctctcccccttcgccttctggctcgccatattcaacatagctttcaggcaaactaatattataagccgctaaagcagctttatatcccgcaagcctttggctggtatcttcaatatggtgagtggatgagatataggcgatttgagtatggccttggcgaataaggtgttcggtagcaatccatgcccctttatagttatctaaggcgacacaacgttccgcaatttctgggataaaacggttaattaataccatgctattaacttcattggcataagctaacaactcttcatcagaaagtgccttagagtggatcactaaaccatcacaacggctgttgatcaagagttcaatagattggcgttcatcttgcgcatcatggtaaccattacacaccagaatatgttttcccgcttttctggcgatattatcgaccgctttgaccaaggtcccaaaaaagggatcggatacgtcatgcaccaaaacacctaatgtttgggtactttgactgaccagcgctcgcgcagcagcattggggcgataacctaatttttgcattgccgaattgacaatctctatcgatgctcggctcgcttttggtgagttattaatgacccgagataccgtagcaacagaaacacccgcttcttttgccacatccttgatagttgccatatccacctcataaataactcttattctgcattaaaaaccttgtgtcattaatcgatggctaagaaaaagagtaagttataaaacaagtggcatgattatcagtgaagataagaaatttaaaaagtaaaatgatcaaataaacagtaaaaaaggaaagcgtttacactttcctttatctattactgataaaatttatatattgtttggctatgccacggagtatttgcagctaaaataccttggttctcaccccattcaggatgattcggcccatcaggaaaatattgtgtctctaaagccagccccgaataattaccataacgacgagtttttcctttactctgtgccaaaaaatttcctgtataaaactgtatagaaggcatggtagtaaaaacatccattttaagctcaccttcaggggcaataactgtggcaatcgatgctttatctgctattttttgtttgtctaaaataaacgcatgatcatagccattagcggctttttgacattcatctcgcataaaatcgatgccaatacgttttaattgacgaaaatcgaaccccgtcccagtcacatcgacaatttcccctgtaggaatattacccgcgccattttttaagtagtgagaagcgtggataactaaatcatgttcaagagccgttcgctgagtatgctccccagctaaattaaaataggcatgattagttaaactcagcgctgtcgttttatcactaatagcctgataattgatatgaacttcattatcatccgttaatgtatatgtcacactggcttcgacggtaccgggaaatccttgttcgccatctgcggatagcaagcttaaagtgaccgactgtgtggattgcgccacaatagtccagcgacgatggctaaaattttgtttaccaccatgtagcgtattgttgccttcattagcaacaaggcgatactcagttccggcgatggtgaatttagcccctgcaatacgattagcaaaacgccctaccgttgcgccaaaataggccgtttgctgttgatgggctttcatatctgcagatcctaaaagcacatcgcgacgatagccattaacagggacaatacaacttaaccatgtcgcaccaatatccataatggagatagacataccaaaacggtttgtcaaaatcacgacttgagcaggcaaaccatcaaaagcggcttgtgtggtcatctgttcaggcttaaaaaaacggttttcatttaatgccattagttatctccagatagcccgccccttggcttgcagagcagacataaatagtttcttttaaacctgtttgttttttatattgggcttcaaccgcttgtgtcacttttgcgactaaatcaggagtcaccagcgccaccacacagccgccaaaacctccgccagtcattctaacgccaccttgcgaaccaatcactgatttaacaatttctaccagtgtatccacttcgttaacggttatttcaaagtcatcacgcatagagatatgtgattgtgccatcaattcactaagtttagtaagatcgccttgttttaacgcctcagccgcttgtaaagtacgctcattttcggtgatcacatgacgagcacgtcgatatactttatcattcatcagtgcctttttcgcttgcaattgcgctaaggtcgcatctcgtaatgcagtaacatttaatatttttgccgcttcctcacactgttgacgacgcgtattatattcgctatcgactaaccctctttttttatttgagttaatgatcatcactaccgcactttctggcatttttaccgccgtagtggctaatgaacgacaatcaattaatagtgcatggctctcttcaccacatgcagaaataagctgatccataataccgcaattgcatccaacaaattggttttctgctttttgaccgttaagggcaatttctttttgactaataggaagttgataaagtgtttttactgtttgtcctatagcaacttctaatgcagctgaagagcttaagccagccccttgaggcacattacctgtaatggcaatatccataccctgaaatacatatttggcttgttgtaaaaaatgaataacgccacgaatatagttagcccacattttattaggtaaaaactcaatgggatgttcgagagagaattgatcttgcgcattctgataatcaaccgcaatcacacgaataagattatcatctcgtttggcggcagcaactaccatttgataatcaatggcacaaggaagaacaaaaccatcgttataatcagtatgctcaccaatcagattaactctgcctggagcttgaataaaatgtgttggggcataaccaaaaatagaggtaaaagaatgagtcacattattaatcagtgcctgcataataaatccttaacttaaaattaagtaataacaacctgttacatcaatataatagtgatgcatcctaggctaggtagtgatttaaaaagcgtccgccatcaacccgttaagctaattttcttgctctttataatggatatcgcttacttggcgtaaattataagcagcttgctctggcgttaagtcgcgttgcgattcagccaacatttcataacccaccataaatttacgtactgtcgcagagcgtaataacggcggataatacagggcatgtaattgccaatgctcaatgctttcgccctctttaaaagaaggtgcaaaatgccatcccattgaataaggaaatgaacaatgaaatagattatcgtagcgactggttaatttttttattgccaaggctaaatcatcacgttgttcagccgttaattcactcattctgcgaatatgactttttggtaatagcatggtttcataaggccatgatgcccaataaggcacgacagctaaccagtatttagtttcaaccacggttcgactaccgtcttcagattcagctttaacataatccattaatagattacggccatattgattaaaatagtcttttaattggctatctttgcgtgctaattcattaggtaaaaaatcactcgcccatatttgcccatgaggatgaggttgagagcaccccattgtttcacctttgttttcaaatacttgtacccatagatactctttacttagcgcttctatttggttatcccaagtatcaatgattttacgtaggctactaataggtaattcgggaatagttttactatgatcgggggaaaaacaaacaacacgactgatccctctcactgcttgagtctggaagagtggattatcggatacttcaacactatattggtctgtcaataatgcagagtgatcgttattaaaaacataagtgcctgtgtaatcaggatttttatcacccgaaactcgggtattccctgggcacagataacaatgtggatcataagagggaagtgtcgctatctgaggtttttcatctttgccattccatggtcgttttgctctatggggtgaaactaatatccactgcccggtcaaagggttataacgacgatgaggatgctcaacgggatcaaaaatcagttttgacataatcttctctcttatttattaaagattatctgatagcgtttttatgatctatttcagataaccgttaggattttgtgattgccaacgccaagcatcggctgccatatcatcaatagagcgaatggctttccagtgtaagtctttttctgctttggcaggacttgaccaacattgtgcgatatctcccgggcgacgtggctgaatttcataagggattgctttaccactggctttacgaaatgcttcaatcatttcaatcacactggtgccattccctgtgcctaggttatagatatgtaaccctgctttttctcctaacgcatttaaggcggcaatatgaccatcagctaaatccataacatggatatagtcacgtacaccagtaccgtcttttgttgggtaatcatcaccaaataccgcgactttttcacgacgacctatcgcaacttgcgagatataaggcgttaaattattaggaatacccttaggatcttcccccatagtgccagatggatgagcacctactggattgaagtagcgcagtaaactgatagaccaactctcatctgcaatatagagatcagacaaaatacgctcgaccatatatttactggtgccataaggattggtagtgccaccaacaggtgactcttcagtaataggcacagtttgaggatcaccataaaccgtggctgatgagctgaaaataatactttttacgcccgcatcacgcatacaacgaactaataccaaagtaccgttaacattgttgtcatagtattcgatgggcttttcaacagattcacctaccgcttttaatccagcgaaatggatcactgattgaatagagtgctgagtaaaaattgtggccagtcgtttttcgtcacgaatatccccctgataaaacagtgggcgttttcctgttaatgcttcaattcggttaagtacctcttcatttgcattactgaggttatccaaaataataggcgtcatgcctgcttctaacatttgcacgcatgtatgactaccgatatatcccattccacccgtaactaaaatttccacattcacctcttttgatttatttcaaatgaaaagcgtcaagcggttttgttgattgcctcagagtttaacaagttcaacaaactaatttcgtgatcaaaccgacatttagtgtaaacgtttacacgcttttcttattccttaactatttaataaaaacgacctaatataaccgtattacagcaaattattgttaataatcgttatatagttattttagagagaactgccctcttcaccataaaagtaaacgattacattatactgaatactttaattatatgataaaactgatattaattggtttttatcataccttattaacatccacgctaatatgctttacagtgaaattaagagtagcctcaatagatgaattgaagagaagagagtgtgatttatatctattagttaataccaattaggagaacgctatgaaacccgttgtaatactttatcaaccgcttccagaaaaactgcaacaaaaattatctgccgttgctgaggtaaaacagtttaacgcgctctctctcaattgtgccgattttaaagccaccctcgctcatgctgaaggattgttaggtgcaggcggtaatatcgataaacactttattgaaaaagcgccaaaactaaaagccgtatcaacgatttctgtcggttatgataatgtggatgttgccgcgctcactgaacgtcatatcaaattgatgcatacacctacggtattaactgatactgtcgctgatacaatgatggcgcttgttcttgccgtctctcgtcgtattcctgaactagctgataatataaaacaaggtttatgggtaaaaagtattacgccggattggtatggtactgatgttcaccataaaaccatggggattattggtatggggcgtatcggtaaagcattagcacaacgcgcccacttcggttttgatatggatattatttaccattctcgtactgaatataacgatgttaaccagcattttaatgctaaattttgttccctagagatgcttttacaacaagctgattttgtctgcattactttaccgctaacgccagaaactcatcatctgttaagcgcaaaacagtttgcattaatgaaagctgacgcctatctaattaatgccggacgcggtgccgtggttgatgaaaaagcattaattaacgcattagagcagcgacaaatagctggagccggattagatgtgtttgagcaagagccactgccaacctcttcaccacttttaaccatgaaaaatgttgtcgccttaccccatattggctctgcgactaaagagactcgctatgcaatggctgaatgtgccgttgacaatctgattgctgcattaaccgataatgtaaaagaaaactgtgttaatttttaattaagcaaagaataaaaaaaaaggtaataaatacaatttattacctttaaactatcaaatagttaacgctaaattaagcaggatcgacgtgtatcatcacacttaaaatctgtgcatgctgtttaagtactctatcatgggcattgaccacaatatcatgactttgattgaccgttaattcgcctttaatttctaaatggacatcaactaataaataatcacctgcacgacgggtttttaaatcatgtaccccttgtactcctggtgtggtgattaatgtattggtgatctgttcaagtgtttcttcatcagcacctctatccatgagatcttgcaaagcttgataggtaaaacgccatcccatacggccaacaaatagcccgacaataagtgctgctagtgggtcaaagaatttaaatccagcaaggctaccaatgatccctattgcaaccactaaagaagaggcggcatctgagcgcgcatgccaagcatttgccactaacatactagaatcgacttttttggctacagctaacatataacgaaataacccttctttagccgctaatgccaataaagccacataaagcgcgatgctatgaacatcaggaatgattgaaggatctaacattttatggatagcagaaaatatcattcccaaaccaacaatcaataaaatcgtccctaacactaatgaagcggcattctcatagcgaaaatgtccataaggatgatcggcatcgggttgcttttgactgcctttattcgcaattaacaccacgaagtcagcaattaaatcagacagtgaatgaataccatcagcaattaagccttgggaatgtgagaagaaaccaattgtgatttgaaatatggataaaaagatattaacaaaaacactgaccaatgtgcttttcttggccgctttgaatttgtcagattgtgttttctcagccatattcaactcaatatcatcaatgtgattatgtgtcataataataatcttattctgtataaatagcctaccctatttgtttataacgaatagagttccataggttatttcaggttccataactcattggtgaggataaaggacgactctgaataacaatcctgtttagggactaagattgctgtccaaacatcatattgagatgctattaacggttaatatgccatactttattgattaagtctctaaaaaattaccaataaaatcctatagatacagaacaataatataattgataatcattcttttgtgcattttcctctagatagctaattaaaatacttttattttaaatatcatcttatttaactcattcctgtcaataagttaagattgatatagttttattctgcctttttagctttttattttaaaagcactaattattactataatataaataattaagtgatagaataatcattctcactcttatttagaacgtagatcacagctatattttttatattcagtgataatagagttatattttaaaactaacgttaagtgaggtttgtaatgtacaaaaaaattctagttcctatcgatattctagaagatgagctttctcaggaactgatcactcacattgaacaaattgctcaagttggcaaacccgagatccacttcctcaccgttattccaaatgcagaacttttcttcggtattgagtttgccgctattcctgaaaaatttaaagactcttcagagcgcactcgcctcgcttttattgctctgcaagatatgatcaaagatacgaaaattcccgatgagcaaattgtttgcaatgtcggtgttggtaatgcaaaagatgaaattttagagtatgcacgtcaaatcgatgcagatttaattgctattgcttcacatcgtcctaatgtttcttcctacttattaggctcaacagcatcatctattgttcgccatgcaaaaatgtcggtattagtgatccgttagttgtaaaaaaagccctttgaaaacaaagggctttccactcaataataattaaagatcaatcattatttctttgttgaatctttaacttcgtcagaagtagaccacacacgatatttcacatctacatcttttggtgcatagacaacaataggtaatttgctgttatagcggataaatgccgcttgccccatattagcttgaacaaaggcgggttttttagtgttatcaagacaacccatcatcgtagacattgggccatttaagtcgcttacgatatagtaatcataaccccaaccttcgagatcttttttatctaactcagcaccaaaccattgacgattacaatcaaccatcatctctttacccacgatcaactcaacttggtaattgccttcgttttctttttgttctaactcaataacatgacgaatttgattttcctttgctttaggataaggagcgactttttctaaactatcaaccgcttgtgcgcaagcagacaaagacatcgctgcaaccaaagataaaattactttattcatcattttctccatattcacagcgccaaatcgctgttaacaaattttgcttagatatttttattagtaatcatcttaatactagcattttataatatagatgctaacactttagcagatctctctctgagaggattattctgataattttttaaagaactcattcttttattgatgaaatgtaaatttgtgatgcactaacgtgcagatcagctatctatgattatactgaaatagagatcgcaatttctttcattaggaggttatatgttctcagaaagacaatcactggtttctcagttaaaaaatacccatcctcgtttccaagctctctatgataaacaccatcgacttgatcaagaaattgctaaattagaaggacctaatggcgcaggctacaatgatgaagttgcaaaactaaaaaaagaaaaactctatctaaaagatgaaatgcaaaaaatacttcaacaagctgagaaataaaccgttcttactacggcgcaaatattatttatcagcgacctgaagcgatgaccttttgtcatcgcttttttatgattaaaaacaaagtttccctcctaaaaagatgcataataaatacatcttatataattaagggctaacaaatggcatctatacatggtcatgaagtattacatatgatcctttcatcaaaagtggcgtttacgcaaagatcacttatcgaggcaattcatcaacgttttggggaagaagcgcgctttcatacctgttctgctgagaatatgacagcggccgaattagtggcatttttagaaaaaaaaggaaaatttattgctgctgatggcggttttactaccagtgaaaacaaaatttgtcgccattagtaatatcaataagtagattgccagtaagcaacatgtttggcatgttgttaactatctatctaatcaataaaagtaagatgctctggcaatctctgtttaacttaattggtcgttaatcatcattcgtttggagccaactatcatcttcccaaacactttgaattaactccataatatgctcatgcttagcttcatcttttacgcccgtgacttggatcgtattcatgctactaaaagcgatacgaaactgcatatcaggataaataggaataattttttttcttagttcatgttctaacagcggaaatagtgagtcagtgacattagattgtttgttaaataaaatttccacacgcattattttcaccataccaaggcaaataaactgtatataaatacagtattatataatcaaaaaaaagaaaagtatttttgcaaaattttttctttttttgccttaaaaatagccaattaatttatcatcccagtcatgcgttatgataaaatgcattttaaatgcaacaataagaagtgagagtaccatgtcaggtaaaagaattaatcgagagaagcaaaccatccaaaaaatggttgctctgtatgaacgagcgcatcctaataccgaccccgagtattatcagcaattagtgacatatgcttataaaagactagataaatgtcgctatggtgaggaaaaacccgcctgcaaacaatgcccaattcactgctatcagccagtaaaaagagcagcaatgaaacaagtcatgcgttgggcggggcctcgaatgctaatttatcatccctatttagcaattaggcatcttattgatgataagaaacccgttcctgcattaccggctaaaaaatctaaacgtttatcgggaaaataaagtctgctttttttaatcggtataatacatgttgtgctaaagggtgtgttttatctagagatggatgcataaaatattcagacttcttcataccgagttttttcatcaccccttctgagggtaaattggtcacggcggtaaatgccaccacttcttccagtttcaactgttcaaaagcatattttaatactgttaaggccgcctcataagtgtaccctttacgccaatgagattgtgcaatacgccaacctatttcaacacacggattaaaaggcaaaggggcattaggaatatttaatccaacaaagccaataagctcttgagtctcttttaattcaacggcccaaagtccccaaccattttgctgaataaatttatcacgcaatgtatcaaccattgcatcgctttctgcgcgggtaagtggtgaagggaaataacgcatcaccgatgctgaggcgttaatatgtaaaaaaaatggcgctttatcactttcacgccattctcgtaaacgtaatcgaggagtagccaattccatcattattctcattctaattagttaggataataatgataaaataaaacagatcataagtaataaaaagagaatcgcttttattttttattttcttttagtttactttctgcagttacagactctttattggtattaactgtaccttctttaatagatacaacacgttgctgtgcaacggctttagcttggtgttcaacctgttcagattgtccagtaaagacaccgccacgtttaattgacatactgccacaacgactagtgccacgtagttcaccatgctctagaatatcaagattgtttgcggcacaaatacctttaacaaaaccatcaataatgatgtctggcgccgttaattccccttcaacttggcccgcatgcataacacggatcacgccatcttttacattgatattccctgaaattttaccccaaatttgaatatcaccatcaacgttaatatcaccttgaaatacagtgcctttagcaataatggtatacaatttttgctccggcataggctttttttcttctgccataactggagcaataggctccgcggcttttggtgtttctgtttttcgactaaacattgccgttttttttaacctcaaagttatagagtaaataataatgctaaaaattaggataagggtgatcaaaagctcaccagctatttgatatcgccaaaaagccattaatgcacatgaccaaataatccatattatgctaaatataatatcccgctgtgttcgcttattatccataattagctatatctgaacctccctgataataaatacaccagctctacttattattttaataaataattattcaagtcgatggcgataataacgccatatatcatccccaattttgggctttgctttttagggaaaaggtcgatttataagtagataaaaaagagataacaattaattttttgctaatttatgaataagatgcacactttcccatcctataatgatgataatttataacacgaattaacatatagctaatcgcatctattgataacaacttgattattcaaaaatcttcaacaaatggaggagagctaacaaaacaacaataaaaccatcacagataaaatatgagacattagtcacaaaaataaactaccgtctatttttaagactaatttcttgatacattactggccatttttatgatagacgttaatttttatgttttcataatgttaaaactatataaagacgaaaaaatatacttggggaaaatttatagcaagtttatttgcttctttgccatactaaaaaagataataatatatagtgaaaataacctataaaaattacattttattttttttatcaaataaattcattgcaaaaaacactcatttaatatacaaaataaaaacatacacacaaaaatttattaacaactcatattaaacaactttatagtgtttaaaaaacacccttattatgctttacagtgtaaattttaaaatgaaatataactaattgttatttatagaataaataactctatttcattatctgtcaatatattattacaaaattctactaaattttgtcgcattcttttcattaaatgactagcttaattaaattgtttttgcaatctataaaaaatgacattaaattaaacaaatgatttatcttaaattagaaatggcaacttcaatgtctaatatctaaaaaaaaaccacatcataataaagaaaacattctattttttatttttaatactctttaaataataaagaagctactactttatattctttttatttattggtattaaatacagtgatacttatataataattttgggcgaaaaatgaatacaatacaatgtggtgaaaacactaaacaagattgcgttattcaaaaactctcttatttttatccgcaatatcaaatattagaaaataaccaaaaagctttatacataatcagaaataatgcgctggtattacaaaactgcacaaatacaataactattaacaaagatcagattattttcttacaacaaggaaattataccataaaaacgctaggcaatgagccttgtgaaacaatttatattcctctttctgatgatttcttaagaaatttcatgtcaaaaaatagtgatattctcagtaatatcgatagagaggaaaatttctcatcggcttttatctgttttgaagattcacctctgatccatttttgtagtaatggttttgattatctttcttcacaaaattgtccagatacttttactcaattacgtattgaagaaatgctcattctattactttcttccgaacaaggtgccaatcttatggcgttactacgccaattaagtcataggcaagttgatcgcttgaaaatatttatggaaaaaaaccatctaaaaaattggaagctaaaacagtttgctcgcgagtttggtatgggtctcaccacatttaaagagttatttaatcatgtttatggaacatcgccaagaacatggatatgcgaaagaagaattatttacgcacatcaattattattaacaacagaaatgagtattgtcgatatttctatggaatcaggattctctagccaatcttactttacacaaagctatcatcgacgttttaatatgacaccgagtaaagcgagacatcttaaattaaaattataaaaaatccgacctattatcataatatcatcgttcaattcatcgctagaatatgcaaaatttgttctgatgagtgaaactattgtgataaagcgacaaactaatactagcaaataccaatattatcgttattttaatttgctaaaaaaaatgatggcagatgaaaataagaaaactgttgataatttatttaatcttcagttttctttacttattacaaataatgatataaatgagaaacaaattaaaatattatctcgtttattatgccgtgaagctgtagacagtttattgcaatccacatggtttttacgcaaaaaacattgctcagtgccattaactaaagaaaatattaatgccgtagtaaatttggctgataaataccaatctaatatatcagatattaattggaacgctttaaatgcaaaaatcaacattgctgatcatgcacgttttattcaagctatcataaaacctatttttatttggtgggttgaacatataacaccgcatatatttacactttatgagataaaaaaagagctcgaatatcaaattaatcaatgtgaaaacattaaattatttgaagaaaaggaaccatcaaatatagcctcttcttttttatctttagaagatataaaaacaaaattagaagctgataaagcacggttcgtcgtgatagatgatttgttgaaaaaggatattaaattagttatagaagcttgggaaaaagagccggtattcaataaaaaaataaataatacattagagtacttacaaaatacacaaccgcattctgagttattacaaccattatgggatattttaatcactattccacaacaccctgaaaattgtaaaaaactaaaacactggctagtagaacactctttatgtttaattaatgatgaatttatgtggcatgtataaaatatcagctcttcattatttatagaagagctgacaacggtaatttattaaagggtgctatttgatagctaaaatttcaattgtcactatagacatcgattctggaggtacttgccctgggataccatctttcccatacccgccatcaggtttaatataaattttagctttgccatttaagcctgctttagcaacaaaagtattaagaggcagtggaagttgacggtatggtaaaattaacggcttagctttgtcataattaagtgttactgtaccatcggttaattgttcatgcatagcgaaaacaactgttttacctgcaattgaatccacaggtttcccttgttttaggattttaaagtaagtgttatcatcgtattgcacatagttctgtttttgtatttccgacagaattgatttatttcgttgggcattatctttaccgataattgaataggcatatgcaagctgacttgcaataatctgcccttctcccatagctttatccaattgctgttttaatgttttattctctttttgaacactcgcactttcgctatttatttttttaatttcactctctttttcttttagttgctcacttaattttaattctttttcttcaagtgttttcgttagcgcacgctgagcttcaagctgcttagagacttcattaaactctttttgagaattcgctaaaacactttcttgttgcttaaattgagccgtcgattctacttgctgctgttttaatgaagcaattagttggttactttcagaattttgttttgctaactgatctttagcttgtgttaattgtgtcgttaatttatcagtaagcgattgtttttctgctagttgtttctctaattgagcataagcgttatcgttcgctattttgctctctttaagttgcccaatggtggtattgttctctttaaattgggtatccaatgcttgatacttattggcaagatctgcctgagctttctctaatttagcgattacaccatttttttctgaaatcaaagcatcaaaagctttctcacccgtagataaactttttttcagctcagctaattcattaaccttattttgtaactcaagcttcaacgctgggatctgtgttaattgatcatctgcttgtgctttttgttgttgaagagtcactaacgaatgatttaactgttgttgctcttggtttattttttttatgtgatcgttaagttgagctatctgttggcgttgggtatcaattaactgattattcttagctagagtagcttcaaaagaggctttgtttttagctaattgattttctaaagattggcgcactgctgataaattagttaaagaattttgtagtacctcaatctcttttttagcactgttatttgttaataaccgttgagcctgcccatattgtgattgtagctgctgtttttgttgctcaagttgagcaacatgggtagtcaattgatttaatttttgtgcctgaatatcaaaatcttcttgctgtttagttaatactttatttttttctgtcgcatcaaacagcaactgatctttttcagctaattgtgcaagcaacgtatcctgctcttttttagactgtgctaattcattttgtaacttagccacagactgttttaggctatcatcattaagtaaattattcgctacagccagtttatcttgcgtttttgccaattccgctgttaattgttgaactttttcttctgcggtttgcagtttagttaaactttcagttaataacgcggcttgttcagtaaatttctgatacagacgttgatatttttcgcgagtatttgctaaacgatttaatagctctttattaaagagaggttgcttatggtcaagcaaagaacgtttaaattgatataaaaaatgaaaaggtatttcagtcactgaatacactgtatttggaatgaaatctaataaagtattatcagtagactgatatggctgccctggataacgcttacgcgtataaagcattagaggattatagaccacggatttactttgataataccgattcaagtcctcaggggtaaattgcggtttaatcggtacaaacgaaagcagtggtgttaaataatgagtgtaatcactgtttattttgttggtatttgtagataccacagagcattgttcagacaaagtcacctgaggtacagagggagtcgccactactgaccaatgctcattgcctaccacggtttgatgttcattccgtacaacaggctgtttaggctgaattttttgttgtggtttttgtggtggcttttcctttaatgtcacagtggaacgcaccgttccactacgctgatcgggagtagatgaagatgaaattgttgcagagggttcaggcttaatatcaacgggctgttgtgcttctaaataacggtcaaaatcttcaatgacaaaattaaactcattattagcaaaagacagcgccggaaacatcataaaagcgagacaagcactctgctttaatttcatagtaattattcacctaatttcttcagtgtcgaattcacagacataaccgaaagatagcgcactttagcacatagtacttcggtcttagattcgatactcatttttaataatgctaagctatctttactagcggtattttcaacactacggtataacgcattaatttcactgatttccttaaattcatccaccatagatttatactctgctggtgaaaatgtttttaaagaatcaagttgcttgatacatgctgtttgtgatgccagtttttgctcccctacgttcatctgttgataattattatcagcaggtgaagttaccgtggattgcacctgtgttggcaccacctccacaggttggctatcaccagataaaatgctacatcccgatagtgtgagaacagtaactgccatagacagagctaaaacattgtttttatttttcaataaggacatcatttttccttaattccgatcagtctaaataagagcgtatgtagtatcgcattttaagctatcttattataattttctattgtctattgcgtactaagtcaataacctagcgcataaatgacaataacggctcctatcctttcatttcattattttttcttacaacattgcatccgtcacattaaaatcatcattaaatgagtatcggtatttttaattggaaaaatgttgtcgtgttagaagcagttatttctacacaatgaagataatagcagataatcagaaaaataataacatctaattttatcatttaattacctttataaggtgtaaaataatactcttttaatgtgttataattacttttattttgttgctgttttctattatcaggataaaatcaaaatatgaatatcaaaatagtaattgatattcattgttatccttcaatataggagagttaagatgagtcattttaacattggtgttgtagtcggaagcttaagaaaagattcctataataaacaaacagcaaaagcattaacctcgctatttcctcaagaatttacttttcagttccttgatatcggtactcttcctctctacaaccaagatgatgacgacaaaacacctgaagccgttgtcgagtttaagcaacaaattaagcaatgccaaggcattatcttcgtaacacctgaatataaccgctcaatccctggtgtgctaaaaaatgcgttagatcaagcctctcgcccttatggtactaatgcatgggatagtattcctgctgggatcatcggtgtttcaatcggtaatattagtactgctattgcacaacagcacctgcgtaattcattagcatttttaaatatgccaaccttaaatcaaccagaatgttttttaaaatggtatgatggaatggtagaaaacggtcagttttctgaaaaaacagcaggttttatgcaaaactgggttaatagctatattaactttgtaaaacataatcaaaaatagcttaaaaatagtcctaaatagatttcacagagtgtagtttataataattacactctgttttattttaaagagagggaaagtaaaactaacttgctaaccaatcgataaaaatataattaactattaattagcaatatttaaatagcacctcctaataataactaactttattatagcaagtaacccatgtataaaaatgacatttaataatctatttaaaatagtaagtggtaggtatttttagtctattagttagcgcaatttaaaaaccaatcaataaaatcattatgttattctttctatctagctcataaaaactaataaattagatattactttagttaccaaaacaaggggaaataattattatcactcattttacacatcttgctcctattaaacatattgtgcgttatatctctcaataatctctttctataattgtgatatataaaaaaattacttatattaataatccattagatactgacaggtaaatcatggataacaacttaagagaaatcgaatgcgagctcgctgctttaaaaatagtcactaaatctctactttgtgcattaaatgataagcaacgacgcgatatgttaggcaatatatctttagttattgaagatacttcaagcagatatccacatcacaatgaagttataaatcttactgagcaatatgtgaaaaaacttatccaagcatagactcattatatgattttaatggtttccccaccaatttaacatcataggatgcacaatattgcatcctatgctcttctttttactaaaataacgttcactcttttctattacttaagtcaaatataacctcttacactctatctttatcctccagtgattaagttaataaaatagatcactttagataaagcgcatctgtaaaagcgttctttctgtactaatacattttttacttggatttacttaaataattaattaatatgcaaaattatcgcattgctatcgtaatagttcctcggaagaatatatggaaaaaaaattagttaacatagaacatgaagttgcggcattaaaagtgattttaaaatcactattacttacattaacaaataaacaaaaggaatctgttatatatgatataaacaaaaccattagaaatgcttatgctgaacatccacaataccaagacataatagaaaaaaccgaacaatacataaaaaagatactccaaaaatagttgtgatttacatcactatcagtaaatagctataactatttatattgttattcattatttttagctttatatctataaatgctgagttattttaatatgacatcatcaatgattgattgagttataatatatggctattatttgccatgttataaaaaaaacaacaacacaaagaattattaaatttattaataaattacatacagttaaaatataaaatctatcaatgcaatatttttaggtatttgctatctatttcttgctgatttatctatttaataaaattcgccaaatcctggatcacagataaccatatattcagaaaatgaaaattgatagacttcaggtgagttaagtttggagcgggcgaagggaatcgaaccctcgtatagagcttgggaagctctcgttctaccattgaactacgcccgcagtagattttctgattatactccagcaaattttaacggcaatcccctgcctatttaaatggttatcaaatagacaatgtagagtgtaatcccttgaaatttagatataaaaaagccatcttgcgatggctatgaaatagcttttattgcattgaaataaatggatttatttctcatcgcgtccacatatcgaccacactaaatcatgcccggaaattatccgggcatttcatcaaatatctaacatctgttgtcaatgcttattaaaatgtggttctactcattcaatcaatggaggctttgaaataaacttattttagggactttacttaccacagttcgtatctcatcattagaaattcttaagattcttctgtttatcgttagataaggaaaaaacatggaatttctattcattgtatctatttttttatttttaatatctgtcgtttgcataactctaggcatgataaaacctagcatcatcaagttaaaaaaccgcaaacaatcatttattgcttttcttattaccttcgtcttatcaatcattggggttcttaatttcgctcccgatacccctaacaaccaaatcaccgaaacacaagaaacaataaccgattcttttgtatgtagtaataaaaatgcaatttacccttcaatttctgccatgatagaagattttaacgactatccatcagatatgaatggctttgagcttattagcgaaaacccattaaaaattagattatccgcttttgctttagataatgattttagtgatgttaaagataatttagctaaacgagctcttgtttatggcatattccgtacatttattaacacaaacaatgatagtatcactatcgtttctaatttagttgattacaacaatagttataaaaagctaaaagatagtccagaatacacagctacaattaccaaagatcaagctctaaaaattacccagaaatatattccaatcaattcattgaatgacttaattgatgaaaactgctcattcacaaaacagtttaatgaattacgttatgacgatagcggtaaaaaaggttttgataaattctttaatgaattaacggcaaataaataaaacaacgcccggaatactccgggcattttcctcaaatcgctaatgcctgttggcaacacttatctacatgcggctctacccgttcaatcaactgaggctttgaaataaaccgcgttacggtttcatgactcacgaacgtcgcaccacaattgatattctggcactggttataacgttctttggtatcggaagatatttgttgactactacgggtatgggcggcatgaccacaaacaggacaaatcatcataaacgggttacctctttatgatgtggaaattacctgtaattatacacaggcactattccttatccatatctatctcactgcttttaacttctaattctaacgaggtggtaaatccgctattgttcaaggaatgactcaccgtgaccaacgtccaataggcctcatcaatctcaggcttaaatccgctaacctttacaggtaattcaggaaagagatccgcacgccctttcgcaagggtaatactaaaagaggcaacacctcgctgtattttttcccacgcggctttcgcggcacgttcagcattggttttactcgcataagtatgagacaacaccatcacattaccttcttcaccgacaaggtactccccttgtttctcctcttcttttttcggtttattggtagtgggttttctacggcgaatttgtgactgtgttttttcttgcggtttacgggtatttaaataattggccgtcacaccagtgtaagcgcccctatccactaatgaaaaacggtgtccatcacccacacttcgggtaatttgtactagcggtaatgcttgaccactggcggtggtattgcccccctgcaccataaacagcaaattgccgtttttaacacaggcggtggcaccgtttaattgccctaagcgggttaaaaaactgccgtctgactcattggtctgatcgatatgttcaattttcaccgtatcaagaccaggatcaaccaccgccgcgacattattgcgccctgcaatcgttctgacgatatcgcctaatgttttttgatgatacgacatttcacggcgcacattcagcgttgccctaaaatccgcactacgggcgcgcaatgtcattttatcgggtacacctgaatgctctatctcatcaaccgtaaacgagcctttatgaataagtctttccccctgccaaccgagatgtaaagttaatacctcaccgcgttttggcatcattaatgcgccatcagaatcatctaactcaatatcaagctggtcagcttcaaagccccgattgtccgttaatgaaagcgaaattaatcgcccttgaattttggcactgatatcttcatcaccagcaattaacacaaaggccggtatgctacttttaccggtgatcatttctggcaacattatgataaaactcctttcatcgcttcaccggcaccattggccatcatgcctaattggtcgcttaaatctcccaacatctgactgatagagtcatccacccgttttaatgtcaacgagaaatcaatttttctagcggctccatcttggaaaaattcggtgtgggtgcgttgtaaatcggtgatcacaaacataccgtgaatggtgcccgtaccatcaataaacgaccacgctttaccgctatctgccattaactccaacgctaacaatgaaactttaccacccgttaatgagggataaagcgcccctgataaggtgatcacatcggtatcagggccaataaactgttgtgccggtcggcgtgcgacacgttgagtaaaaccatgtcgccacgtttgttgtttttgtagggattgataaggtacggtgcgtaactcaaacacaaataccccaagtgctgccatcattaccacacctcactgtcttgataacggctatttaatcgtgcttgtttttcacgctcacggcgctcaatttccgcgataacaagctgggcaatatcttgcgcggattggtttggttgaggatgaatattaatttcataatgtgccggcgcgccttgataacgttgttgttgaatattcacattagccggagcaggacgatagttttcaacgggcaaactgtgtgggtgcaacggggcattttgtgcctgtaacgaaaaggcgctacctaacgataatgcggcagccgctaacatcgcagtgtgtttacgactggtgatattcgcagggccttcgacaatttcagggccattttctcccgcaataccaaatttaccacgcgggatataaccgccggaatcatacataccggcaaagttgctgttgtacgaatctaacgcagactgcattttcggatcattacttttcataaactcaggggtgagtgcttctttagcggcggttgccaattccccaatgctatttttaaagtccgtccatttgtttttgatcccctgaataatggcatcaatcaggtcactaccaaactgcaaaaatttagccggtaacgctttggtgtcttcgacaatctcattccattttgttgatatcgtggtttttatcgtttcccacgtttcttgtacagacttaacaatattattccaaccgtttttaagtgttgttttaattccctcccaaacatctgaaattttagtttttatcatcgtccatgttgtttgggtgtagctgactatcgaatcccaatgtttaataatgagcccaagcggtgtccaattaaagaatatatacttgatggcctcccatgcactcttaatagtatcttttagcgcttgccatgcgatagcagtatattttttaacggtatcccataccttgtaaacgtaggggccaatggtgtcccagtttttataaatcagataaacagcagccgcaatagcggcaataaccaataaaatagggttagctaatatggctttacccaatcctaaaaatgcactacctaataattttatcggttttaataacagtgtgagggcgttaccgcctttaatgcctaaaattgacaagcttaatttcgcggcggctaatggccctaacattgccgcaatggataacgagagaatacccagcgtggtaataatgcccgctatcgctaaaccgatcatcgtcagcgtcttagccaattcagggttttctttcatccacacaccgactttagaaatcacacgggtaatactttgtgatatctggcgtaatgggctatcaatgccgtcaaaaatttgaatacctaaatcttcccatgcggattgcaggtttttcatatctccgcttaagttatccgtcatggtgcccgcgactttttgcgcttcacctttagcttgttttaagtcagcaacaagagtttgcaactcccctttacccgcttgttcggccagtaccgataacgccgaaaaagcttcttcacccgcaatatgtttaaagaaccccgcccgttgcgcattacccatcttagcggttttcttatccaactcagctaataactcaggaaagtcgcgtaagttccctttagcatcacgggttttaataccgagttcttctaatgctttggcggccattttcggcggttcagcaagacgccctaagatagcgcgtaatgaagtacccgccattgagccttgaatacccgcatcccctaacttccccgttgcggcggctgccgtttctaaatcaacccctaaccctgacgcaaccggagcaacgtatttcatggtgtcgcccagcatggttaaactggtatttgaacgagtaaaggccccgaccaacacatcactcactcgccccatttggtcagaatcgagcttaaagccggttaaaatattggagccgatatctgccgtggtacctaaatcaatatcacctgctaatgacattgccaatgttccgggcatagcatttttaatttgctcaggcttaaaacccgccattgcgtagaatgcctgaccttgcgccacttggttggcggtaaatgccgtggttgcacctagctctcgcgcttgttcacgcaacatcttaaattcatcggagtttttatctaagcgcgttaatgcctgcacctttgacatcccgacattaaactcgtaccccggcattaaggtttgtttcgcggaatacaacatacccgcaccggttgccgtcatggtggcaccagtgcccgccattttatttcgtacatcgagcgtcttttgatactgcgatttagccgctaccatgcgccgctcttgttcagcactgcgccttaattggttttcttgccggcggagctgttgcgtagtgcgttcaatatcaccattcagtcgccgttgcgcttgaccgagttggtttgttgaaatgccattagcttgtaatgctgagcgctgtcgctgtaccgactgctgtaactgctcatacttagttttgagctgccccgcttcccgttgcgcttttttaaacgcctctaactgtttttttgtgggattttcactgttggcaatttctttggcgagagtggcaacacgttgtgtggcggattggtacgcttgctgtgtggaggttaactgctgtttaatcttgcgaaagccgtcaatttgtgaggcttgctgattaagggtttttaatgagtcacgcgactggcgtacagcggacgccagtcgtttattactttcttgcgcactgcgaaacggtgcggttaatttatcaaccgcactcagtacaacttgtaattttaagttattactcatcctgttgtccgctacgtttcgccgcttgatagcgccatgacaataattctgaaaggctcattttgccggtgtctgccggtgaccaatgaaaaatgacggcaatatctgccgccagttcatcggtggttaattcgcttgggaatcgggcataaccgacttcggtaataaaaaattgaccacctgcacacttaggtttaccaagtcgcccgcggctaaagacagcacatcgtttttggttagcgttggcatagtgatgcgcggtagcacctgcatcatgctatcaacatccatatccattaaaggctgtaaacgcacaccgcgtaatgcgcctgaattgggtttaagcacggtcactttgtcgattttggtttcaccacgcataatcggttgttctaatgtcactgtggcttggtcaccattgacaacaacccattcaatttgcccttggttttgttcttcgattggctttttcatgttctctttccgaatttaattaaagccctagcgcgtcacgctgtgcttgtaacaggtctttaccgtccactttttccaccatattgacgatatcaatttcaatgatttcttggccgtccatcactaacttgtagtaagtgggttttacggtaactttggtttgtgtgttgtcgcctgatttccagttacccggatcgatttcgctataacggccacgcagaaccacctctacagcaagcacttcccccgtatcatcacgctgataagcaccacaaaaacgcagttgtacggcatcaatggttgaggcaccccattggcggtaaacgtcgatatcagcaccaccgagagtaaactcactatcaagcgcgccgtcatcaagacccatatcaatttgcaccgaaccattcataccgcccccgcgataggcttctaactttcgggtgattttgggtaatgtgagttcttccgcaacgcccacataattggtgccattcataaataaattaaaattctttagcttgcgtggtaacgccatgatttaccccttaattttgttaccgaagtccatcaggtatttatcggtaatacgctgacgtaacatcagattttccattggtggcacgggtgtatagtcataatccagtgtgagtttgccgtctttgagtgcttctttgctatttgatgttgggtcataccaacattcaccgcctaacaagtagccctgactgaccagtgaacgtaattttgcattgatggtttcaacgatatcccgcgctaaagatggcgttaacggtttatcaattgcccacatctgcccttccgccatggtgtcagcgaggacttgcgcgctacgggtataagattcaaaggcaaacagcggatcatccgaacaggtacgcgaaccccaaaaacgaaaaccatcacgacgaataagcgtagtcacccctttttcattcagtaagccggcatctgtcgcgggatcttgtaaatcccaatagatatctttagaaatgcccgtgacaccgttaacggtgatatttgatagggttttatgccaaccgatatcattgtctaacttggcacgcagacctaacgcacgcgccgtggcgtaagcggttgattcgctgttggtggtgctatcccatgaggtaaaatcaggaaaaatgaccattaattcacgctgaccaaagttgtcacggtacttgattgcttcgctgatatttttacagtcgtaagcagacacataaccaaaggcgcggagcttttgacaaatcaccgcaatctcattggcaaccgctaacgtgtcatgaccgggcacaccaataatacgaggtttaatgccgtgttgggcttgtgatgctaacagtgcttgtaaccctgtttttagcccttcttcggtagtaccaccgataatattagtggtggtttctgcctcttcttcaccttgtgcaacacgtactacaatagtgatgggtttagcctgatctgcaatcgcttttaacgtgctggctaaagtaccggttttccctgctttaccgataccctgtgatacatcggtcaataagacgggcttgtttaaaggaaaggctttttcgtccgcatcatcagcggtgcaaactacgccaacaatagcggtgctgatagtgcgaatggggcgggtgccttcgttaatttcaataacgcgcacaccgtgatgataatcttgtgccatgctcacggactcctataactgtgtccgtgtagcatgaaaaattagcgattaaattgcacgaaagcgggattgtttgaggagctgtacaagtgaataatatcagtctaatacatagacacctctagcactaccataagtactatcagtcattttcagctttttcccatcacttgatacttgaagttcccagaaggcagcagcatggactgatactgcaaattttatatttggtataggagggactaaaaatcctacatatgcttcattcgtgtatctctggataaatacatatttacctaaaatattttcacttaacgttatctcaacaaccgcggattcaccattaaaatcccctacctttcgccattggcgctcagtgcctttcctatcatatcgattatctccctgtgcttgtgttaatgccccaacatcacccgccgttaaacgaatatcagcacttagtgacttaccatttactttacgcgtgttaggtacccgcccattggcattattgttagcattgtttgcggcagtctttgcctcattcacttgtgccggtgttgcagcacccacatcacccgcagttaaactaatatcagcacttaatggtttgccattcactttacgcgtgttaggcactcgcccattagcattagtgttggcattatttgcggcagtttgtgctgtgttagctttactcactgcatcgttagcggttttctgtgcggcatccgctttgctcactccactgtttgctgtggcctgtgcattagatgcggcggtcttggcttcattcacttgtgccggcgttgcagcacctacatcaccggcagttaaactaatatcagcgcttaatggtttgttgttaattttacgggtgctaggtacacgaccattagcattagtattggcattatttgcggcagtttgcgcggcgttagctttgcttactgcatcgttagcggttttctgtgcggtatctgctttgctcacaccactgtttgctgtggcctgtgcattagatgcggctgtcttggcttcattcacctgtgccggtgttgcagcacctacatcactcgccgttaaggtaatatcggtactcagtggtttattattaactttacgggtactaggtacgcggctattggcgtttgtgttagcggcatccgctgatttttgtaccttacttaatcccgtgcttaattcggctttggtagcataaagcttagcgacttccgctaatgtctgttttgatgcactttcaatcgcatcattgacaaactcacgggtcgccaatatcaccgaggggtcaaccttcaactcgactgactcggtatgactaacggttaatatcatgcggatagtctgcgttcgtccgcttccctcttgtaattgtggcttataggtttcagggcaattacccacggcaactaaactgccttcatcatcaaataaaccaatctcacgtatccagtaaccgccctcattttcagggatcacttgttcagcaattatctgactgtcgttttttggatcaacaaataaggtatttaatcccgcgcgacgtttttcgcctacgagtttagtttgttgtgtatcgggtgtgggcaacattccgccaccgtcacccacggccatttgggtaatttttaaggtggtgcctagtgccgtggcttttgccaatttattggcaccaatcaccgttaataaggcaaaaaacttagcgctcatgtgcgacctcaactttatcaataatgtgtactccgaccgccgttaatggcgcaccagacacggtaatttcttctgcaaaataggggtaaaccgttaactcatcaccgctaaaggtggcggcagaaaggtaaaattcaccttgcgaatcaaggttgatagataaccctaagagatgccgactaacagggcgtgcatcggcaatcaaacgctccaattcgtcataaatctcttggctaataccgttttcctgcacgcccacatcaaggcgaaatgtgcccggcggatcgtcggtttgccaccactcagtgactttgatgatgtaaccgagtggctcaaccacacgcttaagtgcgccaatggtacccttgtggcgatgaataaacatcgaatcccgtactacttgacgcttaacaggctccgaccaattttcatcccatcgatctactgaccaagcccatgccagatatggcaataactcaatggggcatgtgctggcgttccataattggcgtaaaggcacgggcaaggtttgcaaggattgacaggcaatggcggcggctttttctaatgggctactgcctgacggtaataaactattcatccgagccaccaatggttaaggtgctttgtgtgcaatacgaagcttgtgttttatcaagcactacatctttagtgggttgttttaactccacacgttgcacaccttccacatgcaatgcggcataaatcgctgacagacgaatatcacgccctaagcggtgttgctctgtgatgtattgcgtcagacgttgatttgcttctttgcgtatcggctccgactcaggccccggaaataaaaacaacgtggcatcaatttgataagggataatttgggcggattgcactttgatgcgatcagcaactggtcgcacatcttcatcgtttaacgcgtgctcaacaatgcgcagtaattcttccgatgcggtgccgtcaccctcacgagataacaccgagatagtgacatttgccggcgttgggctgatcacggacacatcggacactcgaccatcggcactacgggcatgaaattcataactacccaccggccccgcaacacttagcccctcaaacgcggcgggaatgcgtaaacgcaaatcatcgtcagactctaaaatcgccggtgtaggcggaatagtgttgttattggcagggcgtaacactaaacgcgataaattataattcgccgctaactgatctaaatccgccccttttgcatacgccaccatcaccgcgcgggcagactcattgatacgctggcgcaataacaactcacgatagacgttttcttctaacaacttggtcagtggttcagactctaacgataacgtgttagcaatcgcatcacgtaaatgcggtggcatcgcagcaatcaatgccgttttgcgttcgcgtaataattgttctgcatctaacgactcaatcacatcgggcggtgttaattggcttaagttaatcgtaggcatgttatgtcaccggtagagagaaattaatcggttgttggttatgggcgtaatagccggtgatatcgacaatcacctgttcgtgttggctatgaatatcaatggccgtcatcacaatacgtggctcccaacgataaactgcggtgtaacacgctgacattaattgcaatcgcatcttggcgttaactgggccatcaattaaatcggccagcaaactaccatattcacggcgcatcaatcggctaccaatgggggtattaaaaatatctttaatagactggcgaacgtgctcaatatcggtaatatgttcaccggtttgtgcattcatgccgagatagttcattgcggttgccccgtattaccatcaccggtacgcacaccactgtgggtatgggttgaaaccaccacgccattagaggacattttcccaccaacatgggtaatatcaccggtcatagtgccgcctttttgcaccgtcagtgatcccgtagttaagttgttggtacaaataacggtaggggtatctaaggtgattttgcttgtcgcgacacacgtaatgtcaggtgacgtgactttgaccgactcgcgggcttcaatcacggcagttttaattcccgtaacggttagcgcccctgttgccggctcatattcaattactgccccgtctttatactcatgacgatgcgcggttaatgaggttgacggctctgaaaaatcatcactaaatatcgccggcaacacaaacgaggtagttaaatcgccaccgattgatagcaataacacttgttcgccaacattgggcgcccaccatgagcgcgagttaccagcacgtgcagtcagccacgggcgccagtcggtttcattgtcgcccgttttaactcgacaccctttttccgcactgacatcaatcacaacgccagtacggatcaagttttgtatttttcggataagctctgcgatattcatacccgcaatgtgcaacgggaaataaaaaaacgcacgggattgggattgtttcaaagacaggacaattaacgggaaagaaattccagtaattgattttcaatatgtttgatatccgccggtgaaaagcctaatagctttctttcaggatattgaatttctaatgacttacctcgcacacgctcttttaaaccgtaatgatgcacggcagcaatgcccgcgacttgcggagcaaaagaaagcgtgacacctttatcattggccgacatacgcaaataacgggcagtggctaaacgcttaaacatgcgagtctgtttattgggctttgcggtgctgattttgtcttttttcacctcaataaaacgcaaaatatcgcgcttataaaaactacgttcggctttcttttccaagtcgtaaccggtgatcacctcacctttttttgttttgcgtaatcgccaattttttaaactgcgagcctgtcctttccagacaaatttcattcctcgcaacacggtaaccgttgatgctttacgtttggtgaatgcggttccatcgggatttttttgcgcgcgaatacgttgcaaattgcttttgcgtaaatcacgggcaatttcacgggctaattttttacgttcattgggtgacgcttttgccaacatagcggctaatgcttgggttaacgggctgaaatcatcagcgttcatgagccacactctcccaactctcaaacggatcagccggctcttcaatggcaccaacaaccaatttatccgcttgcacattaacgaggacacgctcagtcaactttaaatcaatgctaatactggcggtctggttgctatcaataaaggcatcaaaggtaaaatgactttggcgtttatcgggattaaggaaaatatcaggttgatgttgttcaatccaaccaatgatcaccgccattaacacatcttggtcacctggataatcatcaataataatattgagattgtattgatactcataagattgactgcttgcacccgttgccacaatcgccccgccgtcaataaaggtgtagagcctatcggggttatcccctaaatagcttacctttttaattaatgcatcacgcaggtttgcaggctttttcatggtttaactcattgatgtattgcaataatcggtttatataatcaatcaaatattctgtttgtgccttattctccgccatcatttcgaggagacgtaaataatcttgttgagctgtttcggtaagtcgtgcggaggttgcattacccatgccggcggtggcggtggtgtgattatcggggttggggcaatcggctttgatgtacacccgtttagtattattgcgcaactcatcattaagccggctaatatcattttttgcatcggttaacgcctttgtgtgttgtttatccaattctgataagcgggcaagttcttcctgataatgttcaatggcgtcttgatgactgataacacttttcttaagggcgagattatcacccttaagctggctattctcagtgagcaaagcatcaaacttaaatatcagtagcaagcccatcacacccgccacaataatcagcagtacgttccttttcatcgtgggatctcaatatgaggataatcaggaaagcgggtttcaacgggtaaactgggatcacttttccagtttttaccaaaacgtaatgttaccccttcttcatctgccgcttgcttaaatgccattaaaaccggctcaaaaaaatgcgggtgccattccatccctggtttaatcgcagaaggcaaaatatcaatggcatcgcctgttaaatgacggctgtttaatgtttttgaaacgccttttttcacattttctttttgctttttaagtgtgcgaacaccttcaatcactgcaaagtccgccgtagaaatgtctaacgcacgataagcaattttcactaatagcggattaacgccactaagattatttttactgcgctggctaaagataaatttattcaccagagaccttccttaagaatcttttttctaacgcactgaccaatgcagcaccagaccagcccgccataccggcaatagcgccggcaatttcaggttgccactggtaataacttgcaccgaataaaatcaatgcccctgaaaacatagagacaacaatttgtgcaaataagatggcaaagcggaacggttcccctttcactattttattggcataactggcaataccaccaaaaaccgccataccggcaattaataaggcagtaaaccaattcatattatttggatctttatagggcatcttcttcataccttcccccttaaaggggttaatcccaaagttgtaaaatcggtgtggtgctgtgttgttgaggcgtatccggtaactcaatcgcggtgccggtgggtaatattgcccctaattcaaccagccccggattggcttctaatacttgttcaatcatgccggatgactgaccaaagtaacgccaacaaatatcatcgacggtatccccttgttgggtataaatccgcatcagataagctccaccgtgttatgggtttcccctttgatacgttgtaacgcccacttgccatcacgccacacttcatcaatagccggcgtcatggtgtcggcttttttattaccttgtgcggtagtatcaatatcgcgataacgttcgattaaactggcctttgcaaaacagaacaccgctcgctgatataaaatcatcaattcactttcaccgttaatctgttcggcaggcacctcttttaatgttttcgcagcttgaccaatacgccactgatacaattcacgattcacttcaatcatggcgttcaataacgtgcttttcagccgttccggtgtcacagtgccatcgacgcgagtttgcaattgaaaatcacgagtttgaatatcagggaaaaagccattgtttttaatggtttcgtctttttgtgacacagggttagcagaaacataatccataagaaaaccttaaaataggtgggcggtggacgaaagaaagcaaattgctttttccgtgccgccctgacgtggtgtcactatgctttttcagcgtcacgctgggctttaagcactttatcgagttgttttaattcggttttcacaccgatattcatgtttaactctaaggctcgacttaatacgcagtagctttcttgtgggcgattattatcgcgtagcactaaccctaagattttgtagagttttgcccttacttcatcaggcatatcttcatcatcggtcaaagcacgtgtacgctctaatgttgccaatgaaaccggtgatttcacggcatacgctcgcatggcagaatcggcgatttcttcggcaatcacggtgcccgtggtgcggttcacaccggggatcactaaacggttagctaatgcgtaaacggcaatatctaacgccccctcataatcccccgcatcaattttccacagcaaaatcgtcattaagacatcatcttgcacaccgctaccaccggacaatgccccatcaacccacggctgataattggctaatatcttgcgcttataagcttctttgcgttcgcgtgactgaaaatgttttagctcttttttatctgtcgcaagacgtaacagcatcatgtgatagccctgtgtattgcggctaacatgcccacccaattggctggactgttgcgcgctaaggctcatgcggtgtttttcccacggagataatgccattatttcgcctttttattttcagttggtgtttcttctgttactgctttgtcgtctttgacgacttcattttcagaagctcccccctctttttttgtttctggctgtgtctcttttacatcttcaaaaacaatattttcgaccagtgccacaccgcgaaaatcttcaaccacaaaatcttcattcactgactcgtagttttcgatgcgatcgcgttttgggttatctaacacttgacgacgacgagaatccgcaaggaaataaatcgacaagttatcaaggcgagtgataaaaaatgcattgccaggaaagaacggcgcacgtacagcaggcaaaccgccgatacgtttctggctgataatggtatctgccgccagtttttcactgttatcttggtctttattaaccagtggaaaatatttatctgctaataatttacggccacaaatcacaacaagaccggtatcgtcctgatattcaggatcaatcgcagtatcgaccgtatcttgcactaatgcatcaagattttgataagcttgccctttaccgaccagaataggctgggctgtggttgcgccgtctttcgtttcactgcccatcacatgctctggtgcacgctcacggactttttgtaaccagcctgaattcacatcttgcagtaaggggtattttgtccgatcagaattatcggcgcggtgcgtaccattaaaaccaatcataatgcggtctaatgcctgacggcgaataatcgcatcgcggatacgggtttgaaagtcggtaaacttcgcccacatatcaattttggcgtaatcaaggtgggtgtcgtaattggttttctggcaatgatagctatttttggtcagcttaatcggatcacttgtttcgcgctcttttgctgttgtatcggtagtgcctgcgatagttgagccgatacctaaaccgatggcctcacccacttgctcatcaacgggcacgatattaacgtgtgttaaaaattctgctgactgctgaatattggtttccagcgtttgcgcggcagacggttcaatttgaacctttgtatcactaaacgcttgcgcgctaacaccgtaaattttaccgagttgcgtgaggtacgcattaaatttaaaacgagtttcttttttcatggtctgttcactaccttagcaatccgtcagcacttcgctattattttcgccacccgtggccggcggacgatgtgagaacgaggcgtctgtattttcaaattgggtttttaattccgtgagttgttgcgtaagtgcttttaccgcttcgctttggtcggcgttttttaatgcggtaatttctgcagaaagggtttgtacttcttgggcgcacagctccaccgcctgatgcacatcggtaaatcgcgcatcatcactgtgttgttttttagaaaacatctctttaataatgctaaaaagccctggcttctcgctctgcgggttttcatcaataaattcaaagtgattttcttctgcagcagtaaaaacgttatctttgctttgtttgcgctctgaaagcgggctactttgtgcattagcactaaattgcagcatttcagtgcctaaactcgcggggttatcggtaaccgccagcccgactaaatacgcttcgccggtatctgaaaaactcgggtcaatttcaacagaggtatagactttttgacgttttttattgagttcaattaaatcaggcgtcggattgatcacaccatacagtgccaacttacccgccagcgccccttctttaatttcctcggtatacaccgactccacatcaccaaagcgtggtgcccatgaatagttatagtgatcgatattgactcgcgcaccataaaccgtgggatcaaagtttttcgcgatttgggttaaccattcccgatcaactcgacgcccgtccgttgtcgccccttcaacacaaagacgaaccggttttgatttcttcgacatgcactactccagactgcatccgtttattcgttggtctgtatgttgtcggttaaaaggggcgttaaacaatggataaggtttgtctgagatatggcacaacgggaataaagcgaataggtgatcagcggtcaatagactagccgtaacttaagcaagaaatcgtgattgtgcaatgactattacagaaacatttgataaccgaaaaaaagcaatgcacctgtattttgccggttaccgcattgctcgcatagcggaatcgctaggcgaaaaggcgtccacgattcacagttggaaacgccgcgataattgggatgaaatcagccctaccgaacgcgcagagctaaccgttgaggcacgttattgcaatctaattttaaaagagagcaaagaaggcaaagattttaaagaaatcgacttgttaggacgtcaactcgaacgcatggcgcggatcagaaaatatcaaaacggcggtaatgaaacggaccttaatcctaagattgccaaccgcaacaaaggcgaacgccgtcagccagagaaaaacttcttttcagaagaacaaattgaaaaactggaagatatctttcgcaatacgttgtttgaatatcaaaaggtgtggtatcgcgccggtcatcaccgtatccgcaatattttaaaatcccgtcaaatcggcgcaacattctactttgctcgagaagcctttattgatgccctgaccaccggacgtaatcaggttttcctctccgccagtaaagcgcaagcctatatgttccgtgaatacattatcaaaatggcattggaggttgatgttgaattaaaaggcgacccattgatgttaagcaacggtgcaacgctctatttccttggcactaatgcacgcacagcacaaagttatcacggtaatttatatctggatgaaaccttttggatcccgaaatttcaggagttacgcaaagtgacttcgggtatggcgatacaaaaacattggcgacaaacctacttttcaacaccatcaaccatgagccatgaagcctatccgttttggtcgggtaagttgtataaccgcggacgcaaaaaagaagatcgcgttgatattgatatctcacatgaagccttagtcaatggacgtttatgtgaagatgggcaatggcgacaaatcgtcaatattgaagatgcactacgaggcggttgtgatttattcgatttagagcaactcaaaaaagagtatagcccggacgaatataacaacctgttaatgtgtcactttatggatgatatcgaatccctattcaactttaacatgatgcaaaactgcatggtggacagttgggaagtgtgggacgacattcaaccgttagcgctgcgcccttatggttatgatccggtttgggtaggttacgaccccagcaaaggcggtgaaaatggtgatagtgccggttgtgtggttatcgcgccgccgaaagtacccggaggaaaattccgcatattagaacgccatcaatggcgtggtatggattttcgcgcacaagctgacgccattaaaaaaatcaccgaacgtttctatgtggaatatatgggtattgataccaccggcttaggacatggggtttatcagaatgttatccagtttttccctgctgcgcgtgagtttatttataacccgaatgtcaaaaatgccttagtcattaaagcctatgacgtgattagtcacgggcgcttagagttcgatgcgcagtgcgttgatatcattcaatcctttacatccattcgtcgtaccaccaccggaagcggtaaccgcccaacctatgaggcctcgcgcagtgaagaaagcggacacgctgaccttgcatgggcaacgatgcatgcccttttcaacgaaccattaaccggcaccaccgagaacagtaataacattgtggagatttattgatgagccgtaaaaataaaaaacgttttaaaacacaacaaacggcaaccgccaataacagcatggaagcctttacttttggtgagcccgttccggtgttagataaacgagaaatctttgattatctggagtgtgcgcaaattgataattggtatgagccaccggttagctttgatgggttatcaaaactgtttcgtgcggcgacgcatcatagcagtgcaatttatgtcaaacgtaatattttagtcagcacatttcagcctaaccgttttctctctaagttagactttagccgatttgctctcgacttcttaacctttggcaatgcctaccttgaacgtcgtaataatatggtgggtaacttattaaaactcacccccgttctcgccaaatatacccgccgtggtgttgctgatgatagctattggtttgtgcgctatggctatgactcaaagccgtatgaatttaagcccggtagtgtatttcagttatacgaacccgatttaaatcaagagctatacgggttaccagaatatctggcctccaccatgtcagtgctactgaatgaagcatctaccctctttcgccttaagtattatcgcaacggaagtcatgccggatttattttatacgtcagtgacgcctcacaaaaccaaagtgatattgataaaatccgtaacgcaatgcaaaactcaaaaggccccggtaatttccgcaacctgtttatccacgcgccgaacggcaaaaaagacggagtgcaagttattccattaagtgagattgcggcaaaagatgaatttctcaatatcaagaatgtcagccgtgacgatatgttagcggcacaccgcgtaccgcctcaaatgatggggatcattccacagaataccggtggctttggtgacgtagaaaaagcggcaaaggttttctttcgtaatgagttggcaccactgcaaagcaagatattacagattaatgattggctaggtgaagaagtgattaagtttgataagtacacattagatgatgaataacttcaccacacaaagaacaataccgccgacactggcggtattttttacctgtaaggtataagtatcggtctgactaataataatagtgacccaattttattataccgtttacaccctgataaggcgaatccgcctaatttttaccctctcaaacctgtattaaatgcgcctacaatccattttaagcgcacgtaatttatttgatatctaggtaactttttcttgttttaatcgctctacgcgccggaaatttgcgaggaataatgtttttaaccccctcaaaacgcaatcgtgaccccgccacgcccgcgcactaaatagaccgctttttatgcacctgcatgagtgtcacgaaagcccgtgatatctggcgccttcgaataactttgatccttttttgatcttgcactttttacactttgctgcatgattttttcagtaactctcttttgatcaagctaatcgtagatttagtatctattgctggtaattaatcactaaaaattcacattatttatttaattaacaatataaatgacactcaatataaggcacttaaaaaaatctccgcagtttattcaactagcggagatttttattaacgctaaagttagttacaagccaatttatacctgtatgcagataatgaaaccacattaggttcaacattgttagtcatagttggtgatatcttgaaagaaacatcatcaactagctcttgtaacatttctattcttacttgtaacttactagctaataactctgcatcaaaatcaacttcattgagcaaaacctgtaatgcattataaaaaaactcaggtttttcatgaggtattaaacagtcctctttctcatcaatagcttcgcctttacgttttagcccaaaaaatgctgttttatactgcgcatccgtaagtaaagataattgatgagcccgataaattatagctgctttactaaccttccattcaagcttaaattgacttaatcctttccagtcaattctgccacctattggcttaggaaaatatttagccattgaggatctaggcaataataacgcagaagcaaatctattagcttgagattccgttatcctatctcctgttgaaactccgccatgaatgattaaatgagcaacttcatgtgctatatcaaatcgttgcctacatggtgactttttcgccgtattcctcacaataaaaggtctatcaagcggaattgataatgcatcaacatcatcagatacagaatcaaaagcagtaacaaaggcacctaatttttcagccaatcgtgtcatattatctatggggccaaaacctaatccccattctatacgacaccattcagcggctttctctatatcatcttgagtatgaacctttatttcaggaaactttacaggtggcaaatttaaatatttttcaaaaacactaatcaaacgcctatacaattcagctttcgctaatgtggatagcttcgttgatactctagttgcgcttcttttacgaaaatgaacaatctcctcatttataggagactgctcttcattattaaaaaattcaggcaatacttgcagaacaaaggctaattcatcagtaagctcttttgttggtaatgcatatcctgattccaagcgctgtatatactgccgagttttgccaactcgctcagctacttgttcaagagatagctcgtgatacagacgagccagtcgcaaattagagccattaaacacgattcacctactatttattattacgttttacatcttcatcagccactattggtctgattggatctaaattgatagctactgaagttggtttttcatcatcagttgaatgaagtactgagatcctattttcaccataagtccatttagatacaatctcttctaatgcattgcatccaagaaaatgaactcttgcatcttctccttcaaattctggtttttctataacaaatctgtgtattgttggatcagatagctctgttttccataactggtcaacttgatttctacgaaaataacctggtttttttggattttctggatcatcagcaaaaaaccgaacaggaataccatcaatattgaaagtaacgtccatgcctgggtttgttagggataaccactcatattggccactcatacataatttaatcaaaagctgacgctgacgaccaaaggtacaagttccttttgtataattatcatctaaaggcgttgacaattgttcgtatgtttgatctagaacacgcaacagctcttcagcaataatagttaaacgttcttctgttaattggggaaaacattcccacggtgctttgtaatccgccattatcgtctctcgtaagtgcataatttgaaatttgtcaactttgatattggtgcaaaattgtcattttgtcaactttataatagctacacttttttagttgtaattttattctatctttcttcactcataccaataaatttgcggtatttctctgaaataaaaaaatatagcccaataaaaatataaagaggccataacgttgaataatctatcgcttcacccaaactatatttatcgtgataactctttttagatttaatagtcctgtatataaaaagagttactgataccaataaatagaacaaaattaaatagttaatcatttatccctctcaatttattaaccttagccattaccctatctcgtgtatttgaaatatttttctgcttcacttcttcaaaattaactttttcacttttcgttgatgaaatttgaatcttcccgctctcaaaccaaatcacttcatcgccataactcaggcgcagaccattcatcaccattgaccacattgagtctggtggtaaatccaatcccattttttcggcaaaggctttaaattcaggtatcaagcgttcctgattttcacttaatgacaccgttgaaattattcgctgactctttttatgctctaaaacctcgccaaatgatttctcccaatcgctatattgtgaacgtaggtcaaaaacatcaggctcagaaatcccccatacgggcgattttaagctcctttcgtgtgaatttttaatatcgggtgaactgcccgatccacagttattgacaggactccgaggcgcgctgatcgcgctttttaaagtcaaaaccctccccgtttctgacttacgcttatgctcaattgcctcaatatcctgcttagatttacgaactaaacgatactgacgctcacgcgtttttactaaatcgctactttttatcggtgaatataatccgattattcgcatcacttcttcatcataagaattcggctcatcggcaacagtacgagcaactaataacgtttgtaggttacgcttaacgttaggccctccttgatgctcaatataagcggcgaaatctcccgcatcggcagacgctcttactttttccgctatatcacccaacttatcagcgatactcacaccacgaatacgacgacactcacgccatacgcctttagacggtaagccaaacatgtgaaattgaggaatacgccaagtagacgcccacgcagtaacggctgatgcaacctcggttaataactctcccgattcgtcatcaacttcaccctctaacgcataaccgtcgatattttttgaaatatatttagcgagataacccgtagcaccgcctttatttaaatgctttgcttcaaaacggtgtttctttgcgccccgttcttcgccgtcttcttcaagggcatacttacgcatgatctcaatcgctgatgcacgttgagatttatccagaaacatcatcatatgccaatgtggtgtagcgtcatgatgtggctcaacaactctgatcccgtaatagttaatgcctttatctttaaaagcagtgcgaattttcgcccaaattttcactaaataacgttgaccatctttcggagtgtatgcgctgttattccatttctcgttaatgagaacttttttctttttctcatctttagaaacattaatttgcttggtgggatggtattttgaaggcgtggttaacgtaataaataaaccaatatcacctctttcttcggcaactttttgaatacctgcggcttgcgccatcaattccatacggcgaattttagggttagcgatactcgctaatactttttccattaaatcgaagcgatcacccgattcaacgtcttgaatatccatcatttcaagataattcatattcgctaaacgttgcgatctgacttcacgaaccgcatttttactggcgtaaggtgtcttatctgaattcacatcaccaaaggcaatatgcaaagactcacgccaacgttgacgatgagcttttaactttttcagccaccaattttcatctgttaaccggtttaatccggacaacgcattttctggtgttaattttcctttttgagcttttccccaaaacaacggtgttacatgtaaataggtaattaactctcctaattgatgataaatagggttaatcacttttaggttaagtaacacctcacgatcaccgttattttcagcaattgcctgatcagccaattcatcgaataagttgtcacacgcgttcgcaaatgacttcgccatatgacgcaatattttgtcatgcgcatcgggcaagcgattaaagaacatggcttgatcaaaatctctatctaacaaaaattgacgtttatctttcgctaaaccatagcgcgcattaacggcttgcaaacgctgatagacgcttttatggaacttaaagaccagccagttatgaacttctttcggcgttttctcttttttaagatgttcgatgtacttaaataagcgagatttaagaaagcgaggcagtttttcaatatcgaataaaatcgcttgcccctgagccaattgctcacgggtaagcggtctttcataaacaactggctcatgctgtttcccattccaccaatatgtccattgcatatcagcaggataggaaacaggaggctgagaaaaatcaatcagacggctagccattaccgcacaccgcctaaatgcttcggatcaataatttcaatggctgtttcgcacagtttagcaacgtgagtcattacctctatcaattcagagatagacttaatttctgcgcaaataacacgactcacatgcgcaccaacaacgccagccgtcacatttactgcagagtcataccacgcaatcacttcacggcgcacacgaccatcaataacagtgacttcgattaatccaaattgttttttccaataaacgatagcaaaacgagtgccagtaatatgcaccccattttttggatcttgaatatcgacatagccctgttccatcagcacacctccggcaaaacggcgataatttcttttgctgattggcgatttccatttgcagaaatagaacgaggtgcatcaatctcgtgaataataaaaccgagatcggcatacagctctttggcgtgaatggaattagaggcagtaatcgggttaccttgtgattgatttaatgcctttaatgcttgagctaactcaatttgctgagcgtgagtaaaatccgtgtgatgatatttagtaaaactaccttcatctcccatatatggaggatcacaataaacaccatcaccgaaatcaacgagtgacaaagtatcttgccattctaaacaggcgataatggcattaacggctttctcagcgaattgataaatttctttttctggaaaataaacatttttatattttccaaatggtacgttaaattcatcttttgcgttatatcggcataacccattaaagcaatggcgatttaaatataaaaatctagctgattgtttattagttaatactgcatcaagctcctgcttacctaaattaaataactttctagcttggtaataactttcttcattgttttgttgtttccaatcataaagatcactacaagccataacatcaggatttttagaaacggaacgatataaattaattaaatcctgattggcatcagcaattaaatattcttcatattccgtattcatcataacagcacaagaacccgcaaacggctcaactaagcgccttgcttttggcaaatgtggaattaatttatccatgatgcgggcttttgagccagcccatttcagaatggttttattcgccatttcacacactccgataatgcttagatttcagctcatacaccgtttggcaatctgcacagcgagtgcatcccattaccgcaatacggcgcttttcgggtatttcacgaccgcaatcttcacattcaaacgctgatacacctatgtaacgccctgttactgcttttatttgtttatcaagcaataactgtgattgttcgcaggctaaatccatttctttagacataattccattcctgcgcttgatgttcgatagactcggcttcaccttctaataattgaaatacttgtgaaggctccattcgttcacttagtgcttttgatgctaatttgcgtaaacgggcagaaaaaagaaccgcccgagattttctttcatcttctcgaacggctttaattaaatcggttacatcactttctttagacataatcagacctctgataatcaaatataaaaagtcctgacaaataaatgtcatttattttttaggtgtaattaaataggcattgctaatttattcgggattaatgcgctcaatacttttatttgatgaagtgcattaatgatttttattttatctttcctctttaataataaataatctattccgttcttttctttttctatctcagcaaggtaataaatcatctgatatatacgattattttcatttcttaaataatcaagaaactcaccaatcaaaatatcatcactatttttatttaacttacttaataaatcagccctaacttcggctgttttattcataccactgacgcgctcatcaaatgaaagaccatcattgcgataatgctttaccactttagactgataaaaatcatcattgccttgtagttgctctcttgcttgaataagctccgcggtattcataacaacacctagatagaaactttcacaaaaaacgaaacgataacaatggcacataaagccagtgttgctttatccgcttttgaatactttttacttttattagtaaaagattcactgcttaatttatatttgtttctttgcttaattaattggttcattgaatgtcaccttttaataagtcgatatatttagttgcttccgccattgcatcaaacttaccgaatgactgatcatctaaccaaacgtgataacgagttatcggtgttactgcttttcttggcagtttaataatggtgaaaccgcgatacataaaactatgctctgtaatttgctttactatcaccttcatcatccttgttattgtggttcacccattcctaaccatatcagccagccgtcacgtaattctttaggcattcttttacgtgccatacgcaagcctttattccaatcggttacatcgatgtaatactcaccgcgggaattatctgggtgcttaacttctacataaggcaatttcccatccttacgcatatcagacacagctttgggtgttttaccgatatagccggcaaattttgtctcagtgacaaattctgaaccaatattatgaatttcgatttctttcgacatctggtaacctcttattaatgagcgccctttggcgctcttttacgccttgtagctatacgtgggtgtttcgtattaaataaaatttagaggatccgcaaaattatgtcaagttcgaaaaatgaaaagctaaaactaataagagaatcagaaagattaaaactaaaggaaatgtctgatttaacagggattaattaccatacatatcatggatatgaatcagggaaaatgaatatgtctttagaagcagcaacaaaactattttcaattccaagatttagaaaatatatgacttggtttatgtttgatgaaatcaatcctgatgctgggcaaatcgcaccggcactcgcacacagtgggcaagacaacacgcaatcatcccactcagacaagaaaattggataacaatacatcaagcattttgtgaatttattgattcacaaagcctttctaccattggagagctttcttatgacaattaagaaacttgaagatggtcgatatgaagtggacattagaccgactggacgtaatggaaaacggatcagacggaaatttaataaaaaacatgaagccattgcctttgaacgttatgtaatggccaatcacagcaaaaaagaatgggggacaaaattaaaagacattcgcccattagatgaactcgttgagctatggtggaacatgttcggtaaacatagcgagaacggaaaatctaactacaacaatgcaatgcgtgtctgtaagggtatgcatagtagcaatgtatctcaagttacatcaaaaagtatctcattttatcaaaatgagcgttttgctaaggggataaaaccctccactattaatcgagaactgtatgctatacgaggtatattttctcaattaattaaaatgggattatatgaggctgaaaatccctttattgaggccaagaaattaaaaataaatgcgagtgagatgtcttacttaacccttgatgaaacccgaaaactactcgctaatctggaaggtgattattataacattgccgtattttgtttaagtacgggggctagatggggcgaagcaatgaaactgaaacgagagcatatcattgaaaacaaagtgcgttttacttacactaaaacaagaaaagcgcgcattgtccctatatcgaaagaactctgcgatcaaatatgcaaaggaaaaaaagacctcctattttcctccgtttcatatcaagtatttagaaaaatactaaaaagtgtaaaaccttctttgcccgacggacaagctacacatgtgttgcgtcatactttcgctacgcatttcatgatcaacggcggtagcatcatcacattacaaagaattctagggcatgccagtttaaaacaaacgatgacctatgctcattttgcacccgatttcttacaagatgcgattgtaaacaatccattaaaaggaggtctcagtttatagataaaattgtccacagagcgaccacacttggtcgcttttcatcattttttagcgcttttaagctcataattaacttattatttttaagttacttactgaaaattaagcaataaaaaagccatcttgcgatggcttttttcatatagcgtatttatcgtgattcgataattattttcccggacgcatcgctgggaataaaataacatcacgaatagtatgactattggtaaatagcattaccatacggtcaataccaatacctaaacctgctgtaggtggtaacccatgctctaatgcagtgatatagtcatgatcaaagaacatggcttcatcgtcacccgcttctttttgacgaacttgctcttcaaaacgctccgcttgatcttgcgcatcattaagctcagagaaaccattaccgatttcacgaccaccaataaagaactcaaagcgatcggtaataaatggattatcatcattacggcgagccagtggtgaaacttctgctggatattcaatgataaaagttggctggatcaaatgactttcagctacttcttcaaaaatttcacattgaacacggcctaacccccaactcttttcaatcttaataccaatagattgagcaatagcaacggctttatccatatcatctagatcagccatattggtttctggacgatatttgcaaatagcttctttcatggtcagtttttcaaacggtttaccgaaatcaaactcttcatcaccatatttgacgatagtcgaacctaatacatcttgagttaatgtacggaataactcttcagtcaattcgataagatcacgataatcagcataagccatatagagttccatcattgtgaactcagggttatgacgtggtgatacaccttcattacggaagttacggttgatttcaaaaacgcgatcaaacccaccaacaactaaacgttttaaatataattcaggtgcaatacgtagatacatatcaatatctagcgcgttatggtgagtgataaacggacgtgcacttgctccacctgggatagtttgcatcatcggtgtttctacttccataaagcctttattcaccataaattggcgaatagcagacatgattttcgagcggatcttaaaagtattacgtgaattttcattagagatcaggtctaaataacgctgacgataacgtgtctcttggtcagctagaccgtggaatttatcaggtaacggacgtagtgctttagtcagtaaacgtaactcagtacaatgaatactcagttcgcctgttttggttttaaatacacggccacggccacctaaaatatcaccgagatcccattttttaaactgctcgttataaacgccttcaggcagatcatcacgagagacataaagctggatacggccgcccatgtcttgcaatgtagcgaaagatgctttccccataatacggcgagtcatcatacgacctgcaatagcaacttccacattagcagcgtctaactcttctgcactcattgcatcatatttttgatgtaattcgtcagacatggcatctctgcggaaatcatttgggaatgcgttaccattatcacgtaaagctgataatttttcgcggcgagtttgcagttcgttatttaaatcaggtgcctgctccgcaccttgttgctgttgcgacatgtttttcctcacaggcccgcttttaagctagcttcaataaatttatcgagatcaccatctaacactgcttgtgtattacgcgtttccacaccagtgcgtaaatctttaattcgtgaatcatctagaacataagagcggatttggctaccccagccaatatctgacttattatcttccatcacttgcttatctgcatttttcttttgcatttccagttcatacaacttcgctttcatctgtttcattgcctgatctttgttcttatgctgagagcgatcattttggcattgtgtgacaagcccagtaggaacgtgggtaatacgtaccgcagattctgttttattaacgtgctgaccaccagcgcctgatgcgcggtaaacgtcgatacgcagatcggctgggttgatttcaatatcaatattgtcatcaacttcagggtaaacaaaagcagagctaaatgaagtatggcgacgtccgcctgagtcaaatgggcttttacgcactaaacggtgaaccccggtttctgtacgtagccaaccataggcatattctcctatgattttgattgttgctgattttaaacctgcaacatcaccgtcagactcttcaataatttctgttttaaagcctctagattcagcccaacgtaagtacatacgcattagcatacttgcccaatcttgtgcttctgtaccgccagagcctgcttgtaaatcaagatagcaatcagcactgtcatattcaccagagaacatacgacggaactctaattgctcaagctttttgtttaatccttctaactcagcaactgcttcgttaaatgtttcttcatcatcggcttcaacagcaaggtcaagtaaaccagaaacatcttctagtccttgttcgagttggtcgattgtttctacaatagcttcaagagatgagcgttcttttcctaacgcctgcgccttttcaggctcattccacacgtcaggttgctctaattctgcgttgacttcttctaaacgctctttcttggcatcatagtcaaagataccccctgaggacttgagtccgctcagcgacttcttcaattttgtgttttactggattgatttcaaacatactttttcgtcttaacgttgtttttaaaaacaattggaataaattttgaaccgcatattgtaacggatctcagcgcgggtttatagcatttatatacaattgtctatcggattattgtgctcataacagcgcgctgcccaatacaaccataaaatgacttatctatcgcgattagcaaggccaaatatgctccaccagcagttgtgcattgcgctgtcctctaaattcattgacgtctaatcggtaagcaagctcaaccgttttaatactgttatccggccatatattaacatcaacattaaatgcaatagcatcaatcattacatggctatttatcggttgaagcatcatttttaaatgtttgcttcccacaatacgttgctgtagtaaggtgaatttgccatcgaaaagtggctcaggaaaggcttgtccccaaggccctgcttctcttaacatttccgcaataggtaaagataactgactgtcgcttaactcgccgtctgttaaaatcacgccttgtaattgttcagcagaaactaattccgccataagtgccgaaaagtgacgctgaaaaagtggaaatttatcttcttccagagatagtccggccgccatcgcatggccaccaaacttcaccattaatcccggatttaacgtattcaaacgttctaatgcatctcgcaaatgtacaccatgaatagagcgtcctgagccttttagtaaaccatcaccgcttggggcaaaagcaatcactgggcgatgcagtttctctttaattcgtgaggcgagaatgccaaccacaccttgatgccactgtggatgataaatagctaatccattcggtaagtcatcttgggtagtaataaattggcgaaagattgtcgacgcttcttcttgcattcccgcttctatttcacgacgagtctgatttaatccatccagttcattggcaatttcacgggcgacaccaatatcattagttaacagtaaagcaacgccaacagacatatcatcaagacgccctgccgcattaagtcttggccctaatgcaaaacctaagtcactgctgactaattgtgacaacgttttacgtgaaacttccgtcaaggctttgatccctgcacagcaacgtcctgcacgaatacggcgtaatccctcataaacaaaaatacgattattttcatcaagaggaaccacatcagcaaccgtgcctaatgcgactaaatcaaggtaatcggccatattggggcgagctaatccctgtgctgtaaaccaaccttgtttttctaattcagctcttaatgcggtcattaaatagaaagtgacaccgacacccgctaatgatttcgacaaaaaggcacaatccgctaaattaggattgataattgcatcagcttgaggaagggagtgacccggcaaatggtgatcagtaaccaatacacggataccatattcatgagcaacatcaacaccttcaaaagaggagatcccattatcaaccgtaataatcagatctacgcctttcttcgccacatcatgaaccacttgagggctaagtccataaccatcatcaaaacgattaggaatatggtaacttacttgctgaaatcccatttgccgtaacgctttaatagcaagagctgtactggttgcaccgtcggcatcaaaatcccctacaataacgatccgcgattgcagctttaatgcctcaactaataaagagatagcaacatcaataccgtttaaatcttgataatgcaataagccctttaacgagcgctcgagctgagtttcagaggtaatacctcgattggcataaatttgccgtaataagggatcgaggctttctggcaatgctgttgctttcgccacacgccgacgtaatgtcggttcaatagtaaccataaaacgctatcacttctcttttttatttaataattcaagtagattagtcgccgatatatatccgccataaatactcgcatcaggtaatacaatcgcaggcgtaccttgaatgcccatcatagtgccaagtttaaaatgctcattgatattaatttttttacagtcatcaatcgcaataattttgtcacctttaaacgcactatcgagtgattttttaggaaaaccgctacaccatacggcattcatctgttgactgaccacattatttttcaccccgttacgaggaaaagccaaataacgtaccgtgacaccttgtttatttagctctggtacttcttgatgcaatttttggcaataagggcaactaatatcggtaaaaacagtgatcacatatttttcattagcagccttataaacaatcatttcatttttaagtgaatcaatttttttcatgatcacttgattagcgatactgacaggctcctcaccattaatattataaatcggccctgctgtaaggtatttcccatcatcagtaatataaaaaatgcctttatcagaaagcactgcatttaaacccactatcggtgtcggttgaatgctctctgcttttatctgcatttttgccagttgcgctttaatagcagcgttatctgcaaacactggcattgacaccatactgaataaaatgggtaaccagagtaatttctttttcatttgaattcctatttaacaccagccattcggcggttatccccttgggtgatgttgctgatgaagcacttttaagcgctctgtagcaacatgggtataaatctgtgttgtagagaggtcactgtgccccaataacatctgtacaacacgcaagtctgctccatgatttaatagatgtgttgcaaaggcatgccgcaacacatggggtgataatttctctgaatcaattccggcgatcaccgcgtaatgttttatacgatgccaaaatgtttgtcgcgtcattttttggcctcttaagcttggaaacacaatatcatcggttttcccttgcataagggctggtctaccatattgcagatattgttctaaccagtaaatagcttcttcacctaaaggaactaatcgttctttatcgcccttacctatcacacgtaacaccccttgccgtaagctaatatcagataaagacaatcctactagctcagaaacccgtaatccacaggcataaagaacctcaagcatcgctttgtcgcgtaattctattggctcatcaatacaaggagcactaagtaaattttctacttgctgttcacttaggtctttgggtaaacgtttgggtaatttaggtgtagaaagcaaagcgctgggatcatcttggcgtaatttctcacgataaagatattggaaaaaccgacgtaaggtacttaacagtcgtgccgcactggttgctttatagccctcatccaaacgagtggcaagaaaagcgtgtaaatctaacgtcgtcaccgataaccaattgagtttttgtgtgaccagccactggcttaacgcctgtaaatctaaacgataagcgctgagtgtattcgcagataacccttgctctagccaaatactatcgagaaattgttctatgataacgtcattatcttcttggttattatctgttgtcgtttgtgtcgataacttggtctgggtcacgggtttgctctctcttctttacgttgttacttgtacattatgcctcatagaaaaagttttctggtacaatagtgacctttattagcaaaaatatcctaaaaatctttatgaaaattggtctattttacggttccagcacctgttataccgaaatggcggcagagaaaattcgtgacattctcggtgaagagtttattgatcttcataatgttcaagagtgcgatattactctgatgcaagagtatgacattcttattttaggtattccaacctgggactttggtgagatccaagaagattggctcgcaatttgggaaacgctaccaacattagatctcaaagataaactcgttgctatgtatggaatgggtgatcaaattgattatggtgaatggtttttagatgcattaggtatgctctaccaccatttactgccaagtggtgttaaatttatcggtttttggcctattgaagggtatgaatttaccagtcctaaaccacttactgatgatggtaaacattttgtcgggctcgcattagatgaggtgaatcaatttgaagaaagtgatgaacgtttatcacagtggtgtatgcaaattttacgagaaatagaagaaaacttgtaaatcgcaatcaatctattgcttcaggttatctaccgcaaggtaacacttttaaccttagtcaatcagtaagcattctaacggtttatatacatacccagaattaaatatctgggtattgcatcagcagttgtgaaaaatttcgccactcattttccggcatactatcaaaagcaacccatagcgtgatttgcttattatttaagatagaatctaacgttatttttgcaccaaatcggctgatccacggttgttttgcaatctgccattcatgatatttccattgaatacgattgccattaagcagcactaaatcccctttccttttattgatatttttttggctaaaataccaacctaatataagtaaaagtaacaaaggaacccagatataaataaagccaggtggccaaggatataacagcaatgctatttcaaaaataacgtaaacactagttgaaaataactgtgtaaaccaagaaactgttaaatgtgatttccataaagtcacgagtgatattagctcctgctttaatatcttattattacaacaagatatcgtcgtcgttttttaatagcataactgatttttgtaaaaaaaggagaatataaaaaataaaatgacgatcctctattttttctttgaaatgccacgtaaaattattgtcactaagatttaatattacctcattaaaattttctattcttcgttttttacttactaaaacgcccttattcatttaatgaataagggcgtgatacttagtacttcaggctttatttaatgcacttggttttatattctatttttattagtactaatacttattaacaatttcagccatacgaattctattacgctcttgaattaactttaccatgtaataaagatcttcatcatcagggcggccgtggttcatcaaccaattaaataaatcaggatcagcacattcaagtaaacgaacaaagagccttttgtcgtcatcagagagtgtgtcgtactcgttttcgaaaaaaggcatgatagaaatatctagttcacgcattccacggcgacatgcccaatttattcgtgctttattttctatatcgatagtcatattctgctctttaatatgttcacttcaagaaataccactatttcttcctgccttgatgatagtcttatcgcaccctttttaacatcaaaatgatcacaatttgtcgctttcgtccaatagcaacgctttgaagcatcaataaattgttatgcacaaaattctttctgtgcgctgaaaataataatgacttgcattgtcttgtgactcttttaccataaacagtgtatcggattaactacatagcgggtgatgtcatgactcaaaattctactcagacaaaacgccctcatgccgcaatcaatttaccactcaccttgatctctttagatgattggtcattgataactgcaacaggggctgatagtgaaaaatacttacaaggccaactaacagcggatattgccgcattaccgactacagagcacactttagccgctcattgtgaagctaaagggaaaatgtggagtacattgcgcattttccatcaacaagcaggatttgcttatatattgcggaaaaatgttgctgaaaaacaacttactgagcttaaaaaatacgccgtattttcaaaagtgacttttactgaaaatacagatgcggtgttattaggacttgcggggcaaggcgcggcacaagccttagcggaattcttccctgagatcccccgtaaagccaatgaagtggttaatcaccaaaatagctacttactgcaactcccgttacctacagagcgctttttaattgttacagatgaagagactgccaaaaaactagccacgacattgcccgcagaaaccagtgatagtgaccagtggttagcccttgatatcgaggcgggttatcccattattgatacccctaatatcgaacaattcttaccacaagcgactaacttacaagcattaccattaagtatttgctttaaaaaaggttgctatacaggtcaagaaatggtgtctcgtgccaaattcagaggcgcaaataaacgtgctatgtatctgttatcaggtggcgcagcacaattgcccgacattggcggtagcgttgagtggcaattaggtgaagataaatggcgcaaaacaggcacggtattaagtgcggttcgtatggccgataacacgattatcgccgaagtggtgatgaataatgatatggatgctgacagcgtatttcgtgtccaaggtgataccaccagccgcttaacgattaaacctttgccttactctttagaagatgagtgatagcacttccatatgaacggatttttatgacacaacaaactaatggggcttttggccccttttcagataccatcaattttattattgaactcgataaactcaaacgcgtttaccgcaaaaataatgtattagacaatagccgtgctgaaaataccgctgagcatagttggcactttgctgttgcagcaatgagttttcaaccttatgccggtgatattgatataggtagagcgatccagctagctttagtgcatgatattgtcgaaatcgatgctggtgatgtgatggtttatgatgttgccgctcgtgaagcgattaaagagcaagagcaaaaagcagccagacgtattttttcgttgttacctgcaccacaaagtgaatattttcttaatctctggcttgaatatgatgcagcacaaacccctgagtcacaatttgccaatattttagatcgcgcaatgccaatgttaatgaatctacataacgaagggcaaagctgggttgaaaataatatccgtttagaacaagtgattgcacgaaatctatttatcgaaaaacagtggccagaattttggcaatacctctatcctcaattactagaggcacagaaaaaaggctggttaaaataattttttgctgttcatttgatgatgaccaaaaaaataccgaaggtagattttgaatttaccctcggtattttatttagtaatagcgctaaattaacctttattcataatcacttattggcgcacaagaacaatgcaaatgacgatcaccataaacatcatcaaggcgttttactgccggccaatatttattgcgtttcgttgcttcacttgggaataccgcacattcacggctatagctatgtgaccattcttgcactaattcatactgtgtatgtggtgcattcactagcggattatcatcaatcggccataccccgtcatcgacttgtgcaatttcagcacgaatcgagagtaacgcatcaataaagcggtcaatttcaactttgctttcagattctgttggctcaatcattaatgtccccgcaacagggaatgacatggttggcgcatggaagccgtaatcaattagacgcttcgccacatccatttcactgataccatagttagctttgagtggacgaatatcaataatacattcatgggcaacataaccttccgccccagaatagaggatgtcatagtcatcttttaagcgttgagcaatatagttagcatttaaaatcgctacttggctcgcttgtttaagcccttctgagcccatcatacggatgtacatccagctaataggtaatattgaggcactaccaaactgtgctgctgacacggcaccttgggtcgtaacaccgtccatttccacgacactatgtccaggtacaaatggcgctaaatgtgcttttacgccaataggtcccatacctgggccaccaccgccatgggggatacagaaagttttatgtaagtttaagtgtgatacatcagagccgataaagcctggcgtcgtgatccccacttgcgcattcatattggcgccatcaagataaacctgtccgccatattgatgaatgatctcacaaacttcacgtataccctcttcataaacaccgtgggttgaaggataagtcaccatcacacaagaaagctcagcttggtgcttctctgctttcgcttttaagtctgcaatgtcgatattaccattttcatcacatcccacgacaaccaccgtcatacccgccatatgggctgaagcaggatttgtaccatgggctgagcttggaattaaacagatatggcgatttccttctcctcggctttgatggtaacgacgaatagctaacaagccagcatactccccttgcgcccctgagttaggttgcatacacatcgcatcataacccgttatggcagccaaccaattagatagctgctcaatcattatctggtagccttgcgcttgataaggtgggcagaatgggtgcatttcggtaaattcaggccatgtgatcggcagcatttcagccgcagcattaagcttcatagtacatgagcctaacgggatcattgcttggttaagcgctaaatctttattttctaaacgatgcatatagcgcatcatttcagtttcactgtgataaagatggaagttttcatgggttaacaccgcatctttacgcaacattgccgttggaattgaggtcgatgaagaggctaccaatgcatctaatgtatcaatgtcatcagagaaagctttaccactgataatctcaatcaatctgacaacatcttcgcgagtcgtcacttcacttaaagtgacacctactgcgccaacaatatcggttcgtaaattaatttcagcatctttagcacgttgtaatacacccgctttatccgctgtttcaacggttaaagtatcaaaccatgtctgatggcgtaatgtcatgccattttgaattaaacccgcggctaaaatatccgttaagcgatgaatacgctgagcaatattttttagaccttcaggcccatgatataccgcatacatggcagcaatattggccagtaatacctgtgaagtacaaatattcgagttagctttttcacggcgaatatgctgttcacgagtttgcattgccatacgtaacgctctgttacctgcagcatcacgcgagacaccgataatacgtcctggcatggctcgtttatattcatctcgacaggcaaagaaagcagcatgtggaccaccatatcccattggcaccccaaagcgttgggctgagcctaatacaatatccgctccttgctgccctggagccgttaataacaccagtgccattagatcagccgctacactggtaataatttttcgcgtttttagttcactaatgagctgactataatcatgaatttcaccggttgtgccgacttgctgtaatagcactccaaagacaccttctagctctaacactttttcagctttatcgacaatcacttcaaaaccaaaggtgttagctcgggtttttactacgtctagtgtttggggatgaatatcatcagcgacaaaaaaacgctccgcattttttagtttactaacacgttttgccattgccatagcttcagcggcagcagtagcttcatctaatagcgaagcagaggctaaatccatgccggtataatcaatggttacttgttgaaagttaagtaatgattcaagacgcccttgagaaacttctggctgataaggagtataagcggtataccaacctggattttctagcaaattacgtaaaataacaggaggcaatacagaaggcgcatatcccataccgatataagaggtaaaacgtttatttttacgggctatcgcttttagttctgctaatgcctcttgttcagtagccccccctccgacattaggcggcgttgctaattggatattatcgggaacaatcttttgtgttaattcatttaatgaggagatgccaacaacatcaagcatctctttaatctgttctggcgatgagccaatatggcgacgaataaattcatcacgatattctaattgagttaaagtttgtgtcattgcgggtaattcctgaattcacaataaatggataagctgtttttactgatttgaaaataggctgataaataaaaacgccccgactttttaatgacgaggcgtttatttttactcttcgttttcaactaactcttggtagccagccgcatcaaggagatcgtttaattcgctttcatcttttgcttttatgcgaaataaccatccatccccataaggatcactattaaccagctctggtgaaccatccaactcctcatttactgcaataatttcgccagataatggggcataaatatctgatgcagcttttactgattcagccacagcacaatcatccccaagatcaacttcactgcctacatcaggaagatcaacaaacaccatatcacctaacaactcttgagcatgttcagtgatgccgatagtgtattcgccattgccttcagaacggatccactcatgagattgcgcatattttaattcactaggtatttgactcattgaccgtactctccatttaaaataataatgctttataccaatgctttacctgaacgaacaaaaccaggttttaccacctctaccggtatttcacgattacgcaataaaacaattgcgctatctttaatacctgcgggtactctggctaatgcaatactaaagcccaatgtcggtgaaaatgtgccactagtaataacgccttctcttaattcacctaaatcatcggtaaagtgcacggcactacctgcacgtaacacccctttttctcgcatcaccagaccaaccagtttatctgtgcctgttgcgcgtaatttttctaatgcttctctaccaataaattgacgatcttcgggtaaccaggcaatcgtccatcccatattagcctcaagaggattaatagtttcatccatctcttgaccataaagatccatacccgcttctaaacgtaaagtatctcgagcacctaaccccgcgggcttaacccccactgctaataattttttccaataatcaacggcttgctcttttggcatggcgatttcataacctgcttcaccggtataacctgtcgtcgcgacgaagagatcatcaagttgtacgccatagaaaggcttcatcgctgccactatttggcgatgcgattcacttaataaacgctgtactttttcttgtgcgtgagggccttgtactgcaattaatgctaaatcatcacgtacttgaatatcgacgacataatctttggcatgctcagtgatccacgctaaatctttttcgcgggttgcggagttaaccaccagacgatagaaagtctcatcaaagtagtaaacaatcagatcgtcaatcacaccaccggacgcatttagcataccagtataaagtgctttgcctttttcggtgagtttagcgacatcattcgctaatagataacgtagaaagtctttaacttgcgggccatgtaaatcaacaatcgtcatgtgagatacatcaaacatacctgcatcttgacgcacattatggtgttcatcaatttgagagccataatgcagtggcatcatccaaccatgaaaatcaaccatacgagcaccacaggcgacgtgctcatcatataacggagtctgttttgccattcttccctctttctatttttagtttagatgatccagagaacgcaatttgttaaatataaaattaaacttgattaaaaatcagcgtgttaattacaagcttaagtttatttttaaacattattttaacaaatatgagcaattaacgtacaacgcaaacgatacctttactttgaacttatcactaagagaaaaaataaaccataagttaaaatagggtattacctctaccaatcataatgtagagaaataagtatgcagaatgaatgattgtaattatgcgtatcagccctcatttttagtgaataatgactaaaaaaagggagcaatacaaagaatagactgaaaaaatagctatttttagtgttatttttccagtctgttataaagaaaagtaatgtgaaatggcggttgaattagattttttcagctgaaacagaatttttatgctttagccattctggtaaatcagaaagtcccatcgcctgttcaagtaactttggttttactcctggtaaactatctgctaacgaaagaccgatatcacgcacccactttttaatagggttattaccttcaaataattcgcggaacccttgcatagtcgctaacatgaccgcagcggcatgtttacggcggcgctcaaaacgtcttaaatagagatactcaccaaaatctttaccttctgcttttaaacgacggatttcaccaattaattcagcaacatccataaagccaaggttaaccccttgtccagctaaagggtggatggtatgtgctgcatcacctaataacgctaaccgtggagcggcaaattgacgtgcatagcgacccgttaatggaattgtcatacgttcactgactaattcacactggcctaagcacatatcaaaagtaacacctagcgtacgttcaaatcgcgttttatctgcactcttataatcttcagccaatgagctaggtagcgaccacacaatagaacaagtatgaggatctgcaagaggtaaaaaggctaaaatcccctcaccatgaaacacttggcgcgccacattatcatggggttgttctgtgcgtatggttgcgactaaagcgtgatgttcataatcccaaaaagtcagtggaatatcagcatttttacgcaaccaagaattcgcaccatcggcgccaacaaccagcctagcggttaacatttcaccgtcatttaagctgataaaggcttcattttctccccacacaatgcgttcaatttgagcaggggaataacaggtaatatcactatgactggtgaccttttgccacagcacttcacgaataagatgattttcaataatagtgccaagatgagataacccttcttgttgcgctgaaaacgcaatacgtccaaaactatcttgatcccatacttccataccttgataaggagctgtacgtaatgccgttaagttttcccatacccccaatttcttgagtaataactcactggcagtattaatcgcagatacccgtaatgcaaaatcatcttgcggatggaaatgcgtggtgactgggtgattttctattatcgctatacgtaatccacagccatgtaatccgcaggctaatgcaagcccgaccattccaccaccagcaataacaacatcaaatgatttcataataaaagtatcctaaaaagcaattatgctcagtttgtccaacctaatgtttggtgtgctaatttgttacgaagtgcaggcactaattccatcgtcattaagcctagattacgggagataattaacggcatacaacgattcgcaaacactttcactaagccatcagtgatcgtaatagtactttctctatcctgttcgcgaagctgttgatattgtgataatacgcgataactgccgatatcaagacctgattgtatggccgaggttaatgtattggctaatgtcattacatcgcgtaaaccaagattaaaaccttgccctgcaatagggtgcaaggtttgagatgcattacctatcaatgctaaacgatggctgatcatttgctgtgctttttgcagaactaatggatagcaatgacgctgccctacttgttcaatcttacccaaacgccagccaaaatcccgttgtaactgtgcaatggttgtttgctcatcccattgtgaaacttgttctaatttctcaataggatggcaccacaccaatgaactacgcccttcactcatgggtaacattgctaatggaccaaattgtgtaaatcgctcaaatgcacaacctttgggatcaatctctgtttttacattggcgatcaccgcaacttgatgataaggcgttttctgccattgaatatgacattgatgaccaatgggtgaatgtgtaccatctgcggcaaccagtaaatcaccgctaagttgcgtaccatcatcaagtgtcacttcaacgttatcgagatggcgctgaacatgctccactttagcgggacaatatagcgtaatattgggttgttttttcaactgtgcaaacagttgacgccccgcatcatgtaattcaataacataaccgagtgcgtcaatatcgtagtcctgcgcatttatgttcacaaaaccgcaatggcctctatcagaaacatgaacgtgattaataggtgtcacaaagggttttaagaccgaccataatccgatttgtgctaatcgctttgctgtgccatgcgctaaagcgatcgctctagcatcgaatccgggatgcccattatctggctctcgcgcttcaataagcgaaatggaaatattccccttatttaatgcggaaagtgctagtgctaacgttgcacccgccattccgccacccacaataatcacattcatgctgattttagccttaaatttttcctgccatcagagcttcaatttcatcaggatctttaacaaccatagccgttaaattttcattacctgtttcagtaataacaatgtcatcttcaatgcgaataccaataccacgatactcttgtggtacatccgcatctggcgcaatgtaaagtcctggttcaatagtcaacaccatacccggctctaagatacgatcacgatcggtgccatagtgtccaacatcatgaacatcaagacctaaccagtgacttaagctatgcataaagaagcgctgataggcttttgtctcaatgaggtgttcgatatcaccgtgcataatgccgagcttaactaagccttccaccatgatatacacgacatgtttagtgacttctttgatgcttgtacccggtttatacaattcgagggatacattgagtgattttaaaacaatctcgtaaatttcacgttgttgacggctaaatttaccattaacagggaaagttcgcgtaatatcacccgcataaccttcatattcacagcctgcatcaataaggactaaatccccatcacgcattttagtttcattttcagtataatgtaagatacaaccgttctcaccactaccgacaatactgttataggaagggaaacgcgcaccatgagagataaactcatgttcaatttccccttgtaattgatactcatacatacctggctgacatttttgcattgcgcgagtatgggctaacgcagaaatttttccggctttgcgcagtaattcaatttcagcatcagatttaaataaccgcagttcgtgcactattgggcgccaatcaataagcgtttgtggcgcttttaaattacggcgagagccttttcttaaggtatccagagcattaaagacgatttcatcggcaaacgcatattcaccttgggcatgataaacaatatccaatccattgagtaattgataaagttgctcacctacatcttcgtaaggtagcgctttatcaacacctaatttttcaggggcagcttcttgcccaagacgacgaccaaaccagatttccgcggttaaatctctaacccgattaaacagtacgctatgattatgtgtttcatcacttttaatcaacacaaggatagcttctggctcactaaatccggtgagatacaagaagtcactatgttggcgatagggatattcactatcagcattgcgttgtgcttctggcgcagcaaaaaagatagctgcacttgctggtttcatctgagctaataatgcctgacgacgggataaaaattcttgcttattcatacccactcctatcctttattgatcttttggttatctaattaataaggcaattattaatgtaatgtccgttgttcatcttgtttatcattttctgttgttgtctcttttgaggcgacaaaagtgatatagcacagctgaacagagactttgacatattctgtaacttcttcgagtgcatcttcaagctcttgttgattttcatcttcttcatagcctaatgcaccaatattacgcaaatcagtgataacttccgtcaactctttatgctcagataacttaggttgtgcaacacctaatcctaatagaaaatgattaacccaccctgcaagggcatcagctcgaggaaaaacagattctgtatcgtcaggtaacagcatagaaaaattaaatacgctgtcatcaagttgctcatgagtgacgtgataaagtgattcaaggggttctgataacgatttagggaacgctaagccctcattagtcagttcatgtaacaaagttttccaactattgtcatgtactgctccacaaataaacccagtaattaggccatgcatctctgcggcagttaaaggcacggcatgttgttgtaataatgaatcaattgctgagtaatctggtaatgtgttttgtattgacataagaataaacgtcgcatttaggggaatagttcaagatatgctaccatcaatagaacgcactgtaccagttaagctatgttaaacattggaatttttgcagtaatagcgtttaatactgccttataaccgtatacactactaaacacgtagcacagattttatgtcaggaaggaatcatgtccgcacaacccgttgatcttcaaatttttgggcgctcattacgtgtcaattgcccaccagaacaaaaagatgctttactggcttctgctgctgaacttgaacaacgattacaagatctcaaagaacgcagtggtgtttccaatactgagcacttaatttttatcgtggcattaaatatgagtcatgagttggcagaagaaaagttaaaaacgagagactatgcctacaatatggaagagaaaataaaaatgctacaacaatctattgaacaagctttacacgatcaaggcaagcaccatgatcgcactttttcaacatcaaagtagatttgttcagaaagcatgcgcacaccacgaaattaacagataataggttgctttctacaattaaaataatacaatagttcatagataaggtgcttaacagcacccacctaatttctctgagatgttcgtcagtgggtaagtcccctgagccgatatttcaaaaaaaatagaatgtggtgatctattacttgtgagcatacctgattcgttcaggcagcctaatggtgatagcactatgttcaccttggaccacgggttcaagggttacagcctacaacggcatcttggagaccccaattcaagttctaaacactgagtactgattaagtatttaatgtttagagctttttttatttctttttcctctagctttcttggcttttctcttttttacctctaaagtgtaataaattcatagaagtgatatatttttattcatactaattccttgctgatggattaatcatgacacaaccccctgttttccagcaaagagatcagatacgtaaagctatccgccaaaaacgccgtcaacttactgtggcacaacagcaagatgctgcacataaactctctgaacgggtactccatcatcccaaagtcaagcaagctaaaacaattgccttatttctctcttttgacggcgagattgataccgctcctctaatcactcatttatgggatttaaataaacaggtttgtctgcctgtattacacccttttcatcgccatcatttactttttttacgttacgctcccaccacgcagttagtgaaaaatcgttttaatatttttgagcctccactcaatgtgaataatattattccaatatctgatattgatattatctttacgccactggttgccttcgatgaaagcggtcagcgactcggtatgggcggaggtttttatgatagaacattagaaaactggcaacggcagtcattttatcctatggggcttgctcatacatgccaacaagttcattcgttaccgagcgcagattgggatataccgttacctgaaattattacacctgataaagtatggcgttttgatgaacgactgatacagagaaattaagacgagcttttaacgctatctttgtttttttatattattatcttattttataagattaaatctctatttttaaccacattgcatttaatatgaaaaatagagaaagcacgaaatttataaaaagcatcaatatcattcttaatctttcgggaaaacaattagataatacaaaaccaaacattaataaatacgatgatactatcgcatcattagaaaaaaaacatgcttttaaactaaagaaaaaaaatattcattatatttttaaaaaacaattacactacccaataatttttttagatcgttataaaaatatatttattcttttaaaatataacaataatgaatttctaatttataatctacaaactgacaatatggagacatggaataaagagagattaataaataacagtataaatcactattactatctggactttgcagaaaagcatttttttgatatcacttggtttgtcccaacctttatgaaatatcgtatattatttcaaagtgtattattttactcgttaattcttcaactgctagcacttgcctcgccgattattacgcaaataattatggataaggtaattatccatcaagccctatccacgcttgatgtgttaataataggtcttatttttgtcgccgtttcagaatctgtattaaaggggataagagagtatatttatcatcatacagcaaataaaattgatatgttgctaagtttgaaattaactaaccatttattcaaacttcctatcagttattttaaatctcgccaaacaggtattattgttacacgagtaaaagagcttgatatcattcgagagtttataacaaaaaccttattaatgttattggttgatttctcatttatctttattttcctatttgttatggcttatttgtcattaaagttaacattaatctttcttgccaccatcccactctattttatcttagctaaattaattgcccctaaaatagaaaaaaccgtacaacagctttatcaatattcagcaacaaatagtgcttttttaacagaaacgctaggaggtatagaaacaataaaaagcctttcattagaaccacgttttacacaacagtggcatacgcaaattcatcaactgactaatgaaaatttaaaattacaaaatattgataacttatcgcaatacattgtttcatttttacaaaaaataacgacagcgatacttttatgtctaggtgcttttgaagtcatttcacttgcaatgacaataggtcaactcattgcttttaatatgctattaaaccactgtctacaacctttaagttctgcaatagaagtttggggaaagtatatccgagccaaaacggctatttataatttacaagacattcttaatctcccaatagagcaagaaaaagccaataagaaaatgaccttacaaggtgaagtgagttttgagaatgtcagttttagttatcaacatgatgccccccctgttgtaaggcaaatttcatttagaataaatgaatatgaaactattggtatcgttgggacgtctggatcagggaaaagtacattagcacgcatcatcgcagggctttatatcccacaattaggtcaggttaagcttgatgacattccggtttgtgaaattccccccgcagtattacgtcaacaaatagggtttgtcttacaagagaattttttatttcatttaaccgtgctcgacaatatccgtttaacgcaaccatcagcctcattagatgatgttattcatgtagctaaattagcaggtgctcatgagtttattttaaaacttcctttagggtacgacacactcattgctgaaaatggcagatctttatctgggggacaatgccaacgtattgcaattgccagagccttactctcatctcctaaaattttaatttttgatgaagctaccagcgcattggatggtgagtctcaagccatcatcgaaaaaaatcttccccttattacccaagataagaccgtcattatgattgctcatcgcctttccacaataaaaaactgtgaccgcattattgtattagaaaaaggccagataatcgaagaaggcaaacataatgaattgattagaaaagatggcgcttataagaaactttggcaacatcaacaaggataacaatgatgaaatcaaaaataaaacaaatgattgctcactactttaaaactaaaaaagagcctaaaaactatgatttttaccctaatcatatcgccgtacttgagaaaccgccgacaccttatagtcgtattattgcaataataatttcattaagtgtgattatatttttactctgggcatatataggtaaattagatgtgctttcttcagctataggaaaattagtggtttcaggttattcgcaacaaattcaaatttatgaacatagtcgcttaagcgccattcatgtaaaaaatggccaacaagttaccaaaggagaagcgttattaacacttgatattttaggtgttgatgaggagattaataatctaaaaaataagatagaaaatctattattactaaaaattcgttatcaagcattaggtcaaaacacccgacctgatacaattgatgattttaatttactaaataaagaaaaaaaagaagcggttctattaagttatcaaaaagaaaaggatgaatttgatgctagtattaatcatattaattctgaaatagaaaccaacaataaaaacaagcttcttactcaccaagaaatcaattcattaaatgaattaaaaaacaatattgaaaaacgctttaatataaagaaaaaactctatgataaaaaaattattagtaccatggagtttttagaaaataaaaaggagttattagaaattaatcaaatcattaaaagaaaatcatcagaactggttattttatccagtcaagagcaacaatatataaaaaatcgcgatagattagaaaaacaaaaacacctagagtggcatgacaaatttaaacaatatgaaagcggagtttttatttatcaacaaaatctttatcatgttcagaaacgtcaacaattaaaaattgttcgttctcctgttacaggtacagtacaacaactcgccgttcataccctaggagccgtattgcaaccttcacaagcggtgatggtgatagtgcccgatactcagcataatgttgctgaggtgaatattctcaataaagatattggttttatctatccgggtcaaaaagcggtgattaaaattgatgcttttccttatacccgttatggcaccattgaaggcaccattgtcaatatagcaaaagattccatacaacatgaacaattaggcttagtttatcccgtcctgattgaacttgataagcaagtgatgggtgaagatgaagcacaatataaactggctacaggtatgtctttagttgccgatataaaaattgaaaaacgtcgagtgattgattatttactcagtccaatagaagtttatcaacatgaagcattaagagaaaaataatagcgagatatctatgaactatataactaaaaatacgccatctcttcatccttcaattattgatgggcttatttatttttcaaaaaagaataaaggaacattaaaaaaagagcagcttattcattttttaggtaatgacgacaatctctctgaattaaatatcatagaagccgctcaacaactcaatttaaaatgcgaattttcattttttaatagtgaaagtgagtataaagataaaataattattgatacacttatcgaaattaatggttattggtatattctaaaaaatagaacaagtgataaattaattattattgacccaagcactaacacagagagtcattatcatattgataaaaaaatcacttataccacactgctaattattaataagatatttacccctaaacagagcaagtttagcttaatgtggtgtattccatcactattaaaacaaaaaaaatcattatatttaatttttattttatcttgttttattcaattatttgctttagttaatccaattatttttgaaaaaattattgataaagtattaacggggagaagcctctctaatttgcaagttttaggggtactccttgtgctgattgccattatagagcctatctatcttttattacgagataaactttatgcttttgtttcttgtaccctaggtgccgaattctcagggaaaatttatcaacaccttattcggctacccagtcagttttttaatcaacgtcaatctgggcaaattattgctcgtattcaagagcttgctcatattcgccagtttattactggctctgcgttgatgatggtactggattttatttttattatcgtatttctttcagtaatgtttgcttattccgtattattaacttggataaccatagcagcattagtcgtttactttttattttggctgatacttggccccatgatccgttattgggttgaacaagagtatcaagcaaatgctgataatacgagcttattaacagaagctattaatggtatagaaaccataaaaataacagcaacagaacatcaatttattgaaaagtggcaatataaactcactaattatatccttaagcgtttttcagcggccaaaaaagcgttacttgctcagcaattaattggggctattcataaaattactatggcaattatcttgtggcatggtgttaatctgattatgaaagcgcaattaagtgtgggcgaattagtggcttttaatatgtttgccacccatattacacaacctattttacgtttagcccaactttggcaagatgttcaacaaacaggcatctctatacgtcgtattggcgagattgttaatactcccacagagcatcagcatcaaggacttgctactgtacctaatattgcaggaagtatagtattttctcatgtacgctttcgttatacagccaatactccagatgtgattgagcaactctctttttcgatccccgcgggcaaatttattggtattacaggcccctctggttcaggaaaaagtactatcacacgtttaattcaacgtttttatactcctcaacaaggccagatttatattgatggtatggatctcgccattgccaatccccttactttacgccaatcaattagtgttgttttacaagataattttttatttagtggcactattatggaaaatattcggttatcaaaacccgattgtagtgaagaagatattattgaagcgagtaaattagccggcgcttttcattttattactcaactccctgagggatttaatacacaagtgggtgaaagaggtagtaatttgtcaggagggcagcgtcagcgtattgcgctagcaagagcacttttacctgatccacgaattcttattttagatgaggcaacatcggcgttagattatacctcagaagcagaaattttagccaatcttccggctatttgtaaaaatagaacggtaatttgtattgctcatcgacttaatgctatttctatttcagattatatttatgttattgataaaggtcgtatattagaagaaggtacacatagcgatttattaaataagaaaacactttatcagcaattgtggcaacaacagacacagcaataaaccgtgataagtaatgaaccataaaaataaaggctctaattattgagcctttatacttaatattaaaataacgatattagtacaacatacgagcacgaatggtacccggtagtccttttagtttttgcaatactaactcagcttgtgctttcgtttgtgtagtaacgtcaattactacataacccacattgccagcagtacgcagatattgcgcagcaacgttaatattttcttctgtaaatacgttattgatactattcataatacccggacggttttcatgaatatgcagtaaacggtttacatcatcaccatgactaggcaatgatacttcagggaaattaaccgcagataatgtagaaccattatcagaatatttagctaacttaccagcaacttcataaccaatattttcttgggcttcttgggttgaaccaccaatatgtggcgttaagatcacattatcaaatttaattaattctgatacaaaaggatcgttcggatcgttatttgcccccggctccgttgggaaaacgtccaccgccgcacctgataaatgtttactctctagcgcttgtgctaatgccggaatatcaaccacagttccacgagaggcattaataagaatagcgcctggcttcattcgtaatagctcttcgtgaccaatcatattttttgttgatggcgtttctggcacgtgtaagctaacaatgtcacacatattcagcagttcagataagtgacgaacttgggttgcatttcccaaaggaagtttgttttcaatatcgtaaaaatagacatctaaaccaacactttccgccaaaatccctaactgggtgcctatatgaccatagccaataatccccagttttttacctcgcgcttcaaaacagcctttagcttgtttatcccaaataccacgatgggctttagcattagcttctggaatacgacgcagtaataacagtaattcccctaacaccatttcagccacggaacgagtgtttgaaaaaggtgcattaaaaacagggatcccacgacgggcagccgcatctaagtcaacttggttagtaccaatgcagaagcagcctacagcaactaatttttcagcggctgcaaaaatttcttctgttaagtgagtgcgggaacggatccccacaaagcgtgcatcacggatagcttgttttaattcttctcccgataatgcacctttatgatattcaatgttggtataacctgctgctcttaaattctctaccgcactttggtgtacaccttccaatagtaggaactttatcttttctttttccaaagataccttgaccatttaccctgccctatttgtgttacatgaataaaaacgaaatcctgtttcaccaacataacaaaaatagattttgaggcaatacaaccgattgcactgttgacagaataagcgatagataaagtgattttctaccgagcaaaatgattttgacaataaaaatggcagcattttaaagagagatatctctatcgtgtgatatatatcactgaatttatggttttcaaaataatttgcaaaaagtcatcattctgattatctaaggggaaagataaaagagagtgggaaaacaatatagttcacccactctctttagacgatactgttattatctctgactagagatgcagtttaatcgtatcatttaatggttttcacaccttcagaagtccccattaatacaatgtctgctccgcgattagcgaaaagcccgacagtgaccacccctgcaatactattaattttattttctagctcaataggattcagaatagtgagattataaacgtctaagatcacgttaccattatccgtcacgacgttttcacgatattcaggtaacccacctaatttaaccagctcgcgagcaacataagagcgagccattgggataacttcaacaggcagagggaatttacccaaaacatccacttgtttcgattcatcgacaatacacacaaaggtttttgccaccgctgcaatgattttttcacgggttaatgccgcaccaccacctttgatcatctgcatttgatggttaatttcatcagcaccgtctacgtagatatcgagcgaatcaacttcattacagtcaaaaacgggaatgccatagctttttagttttgccgttgaagcctctgagctagaaactgccccttcaatttgacctttcattgttgcaagagcatcaataaaatgagaagccgtagagcctgttccaacgcccacgatagtacccggttttacatattcaagggcggcccaacctactgctttttttaattcatcttgagtcatttacaaaaccttatttttcacatttatcgaataagaatagcatagtgcccataaaatccgcacaaggtgtatcaaaatttgagacacaacattttaactcataaaaactaaaaatatggcatagtacacagtagaacataaaatcaaagagaatctgtcaatgaaacgtcctgattatcgggccctgcaagcccttgatgccgttattcgagagcgtggttttgaacgagccgcacaaaaactatgtattacgcaatctgccgtttcacaaagaataaaacaacttgagaatctatttggacaacctttattagtacgtacggttccgccccaacccacagagcaggggcaaaagctactcgcattactgcatcaggtcgaaatgttagaagagcagtggttaggtgatgaaaatagtggctcgacgcctcttttactctctttagctgtcaacgcggatagtttagctacttggttattgcctgctttgcacccggtattaacacaacttcctatccggcttaatattcaagtagaagatgaaactcgtacccaagagcgattaagacgtggtgaagtggttggtgctatcagtattcagccccaagcattgcctagctgtctagtcgaccaattaggcgcattagactatctttttgtggcatcccctgattttgcccaacgctattttgcaaatggggtcactaaatcatctctgttaaaagcccccgctgtcgcatttgaccatcttgatgatatgcatcaggccttcttacagcaaaacttcggtttatctcccggtagtgtgccctgccatattgttaattcttccgaagcctttgttcagttagctaaacaaggctcaacatgttgtatgatccctcatctacaaattgccgatgagctaaaaagtggtgaattgattgatttaacgccaggattatgccaacgccgcatgttgtattggcaccgttttgccccagaaagcagaacgatgagaaaggtaacggatgcgttacttgattatggtcgtaaagtgcttaagcaagatgaagagtaaaaagtaacgttgatgatattgtttcttgatcaatattatcgctattcttagaaagggatttaaccagtgtgttccatcaaccggtttaactcacagtgaggagttgatgttttcctctaccggaagaagcaaatttaagttttattggcatttaacgggcataatattgtataataaatgaacataggaaaaggagattcagatgagcacttttattcgtcgaagtcgcaacgttgctctagccattgatgctggacgtaaaagtggtagtgctaacatagaaggtaatacccctgctgatattcaagccagcctgctgaaaagcttaggtgagtttactgcatctattccaactacaaaacaacaaccttacgtgaaaggatctcacggtgccaatcataaaaaaacctatttcgggcgttgatctccgtgcaagtttttatttgacttcccaaagtttaggatatccttcaaataaacaggcaatattaatggctgatattgccacattaatagctaaatggaggaatggcttagaggtcgaaatttatacggaaaattatgaatttagatatggtaggatcaagtcttcacgttttaacgcctctggtgaggaaagcgtatattatgcaacttactttcatactcgtgccaagccaaaggacaatgatccacttctaataattacttttgatcccgttgttggacaagacgattttatgttcattgagaccattattgatcatagaacctattttggttcaccgggtgcagataaaactaaatctcatattgaaagacggtcatctgatttaaaacgccgtattgaaaatggaaaaaaaattagttccgaaccttcatcttcagttcaaaacgttaataaaaataacaatgattcgcctgaccaagaaaataagtaaagatgctttttatatatgtaatattttctgacataaaatcattttaaaatataagcttaataaccgtttttcgcacccaaaagaactaccagatctgatcctgcgctataacatagatgtatcagctcactgctgagccaatacatcttatcctttgatggtaaagattatttagctgtttttaattcaaataccacgtcaacgtaatctttaaactcaatgctttgttgttgataggtctcttttactgcttccggtgacggggcacttaatgccatagcatccattttcattcgcgctatcggataaggtgttgcttctggtgcgcgataacttacactataaacagcccctaaatcagcaccaaacccttttgccactgaacttgcctgttgtatggcatttttaattgccacttctcgtgctttggctttgtactgttctggatcattaacgccaaactcaacattattaatttcatttagccctgctgctaatgccccatccagtaaggtattaagctgatcaagttttttgatttttacatctacggttcgtgttgctgtatagccattaatcaccgaacgttctgcttttttatcatactcataattaggctgtgtacgaatgttggcagcatcaatatcttctttcgtcacaccgttttcttttaaaaaggcaaaatattttgcaacacgctcatccacttgttttttagcttgagctgcatcttttgctttttcactaacctgaatattaagtgtcgccatatcaggagtcgctttaattgttgcattacctgatgtagttatatgtggtccttcaggtaccgccccagctaaagcgattgagggtgctccaagggctaacatggatgctaataccattgcttttactttcacaaaaacctcctgacaaaaatcatgtatgggtattgtcactaaattacggttataacaacattagcatatctgttgtaaagttctttcagattaaaagaggtttttccatccctgagcggccaattgcagagcaataaaccacatcacacaccccacaaacaagttgatgatacgttgagcggtcacttggcttaaaataggtgaaaaccaagccgctagtagtgataaagcaaaaaaccaactaatcgatgcgaataccgcgccaaaagtaaaccaaggacgtaattctgctgataattgccctccgatactgccaagcactacaaaggtatcaagataaacatggggatttagccaagtgacggcaactaaagttacaatcacccgccaacgacttttcacttgatttttatgttgtgataattcaatctcttttgtaaaagcggttttaaacgcattccagccataccacaataaaaaagccacaccgccccaagtgatcagtaataaaagatattctgattggctcagtaatgcacttccaccaaagactcccccgctaattaatatcacatcacttaaagcgcataaaaatgcactcattaaatggtattgttttttactaccttgttgcaaaacaaaggcattttgcgcaccaatgggcaatatcattgctgcacttaataaaaacccctgaaaaaatgttgttaacatgcaaaatatcctaataattattcattaaattaagaaaaataataaaatgattttgttattagaggaaatgaatcattcttattgataataagaaaaactaatagcggtaaaaataaaagagccacgcttaatcggtggctcttgagatgtgttttataacaatagtgcttattctgctttcatcacggtattttgtgcttgatgcatatagacatccatttgtgggaatggaataccaatattatttgcatctagcgcgcgtttaaagttttccataagatcccaataaactggccatgcatcatcattggtggtccaaacacgtaccacaaagtttaatgaagaaggcgccatttcatgtaaacgtattgtcacgccttggttatgttgaatacgtttatcttgcgcaacaacatcaccgagcacttgtttgactttatcaatatcagcatcataagcaacgccgacaataatttgtgtacgacgatttggctcacggctaaggttaataacctcactactgataattttgctatttggaataacaatgatccggtcatccgctgaacgtaatgtggtcgagaatatttgtacatctcgcaccgtaccttcgacagcaccaatcatcacgtattcaccagcacgaataggacggaagataacaattaaaacacccgctgcaaagttagagagtgagccttgtaatgctaaaccaaccgctaaacctgccgcaccaagtactgcgataacagaagctgtttgaacccctaatcgacctaatactgcaatcaaagtgaatgcaataacggtataacgcaccaagacagacaagaatgtcacaacagttgcgtcgatatggcgtaacgttaaaattcgtgcaacccctttactgaccattttagcgacaaaaagaccaataaataggatcaagaatgcagcaacgatattcacagcatattgaataaagagttcttgattagcaacaaaccaacctgttgcttcatctaaactcgcaggtaattcattcattagaccaccttttaaacttataatcctaataaaaagaatagcaaccaatagtatattgtggcagatttatttaataaatatatgggatttgttaacttcttctattttccagaataaataaccgatatttttgtagcatagtagcaaaatcatctaatccacaaaatgcgatgctttcattatcgtagtagctcatcccttcttctaaatcatcggtttcaaaatggagagtattcgcccttaccataatttcctcatcatcaatagataagctgtattctttaccaatcaattgccactgtttctcactgcctttaacttcgtccatctcagtcaaaatttgatcgattaagctgatatcaccttggatctcatcatttaaccaataaccaatcgcctcatgatccattgaaaaacgggccaatataccgccagtaagatcacgctgaaattcatagtccatggtgtatgccccttaaattagctgtcgcctttttctatataaaatatctattgttattatggcaaaaataacaaaaaaacaggaggcattgcctcctgtttcagactgctgaacaacgttatatgttggaacgcagttgtaatcaatttttagtgaaaaatcaaactcagttataccgtggtttggaaaatcacttgtgttgctttatctgtatattgctctagttggtcaaaattgagataacggtaagtatcttccgccgtttcatcgactttattgatgaaatcaagatactcttgtggctctggtagacgtcctaacagtgaagccactgccgcaagctctgcggatgcaaggtagacattcgcccccgtacctaaacgattcgggaagttacgtgttgatgttgaaacaaccgttgccccatccgccactcgcgcttggttacccatacataatgaacatcccggcacttcgatacgagcgccactcttaccaaagacgctgtaataaccttcttcagtcagttgtgctgcatccatttttgttggtggtgcaacccataagcgtgtcggtaattgacctttatgttgatcgagtaatttacccgccgcacggaaatgcccaatattggtcatgcaagagccaataaagacttcatcaattttgctgtttgccacttctgataatagacgagcatcatcaggatcgtttggtgcgcaaagaataggctctttgatttcgtttaagtcgatctcaattacagccgcatattcagcatccgcatctgcttcaagtaattgcggatcagctaaccaattttccattgccgtaatacgacgctcaagtgtacgacgatcaccataaccttctgctatcatccattttaataagacaatgttagattgtagatattcgataatcggtgctttatctaatttaatcgtacaacccgcagcagaacgctcagccgatgcatcagctagctcaaaagcttgctcaactttaagttcaggtaaaccttcaatttctaagatacgaccagagaaaatattctttttaccttttttctcaacagtcaataacccttctttaatcgcataaagtgggatggcatgaaccagatcacgtaacgttacccccggttgcattttacctttaaagcgtactaacaccgattctggcatgtctaatggcattacccctgtagccgctgcaaaagcgactaagcctgaacctgcagggaatgaaataccaatagggaaacgtgtatgtgagtcaccaccagtaccaacagtatctggcaataacatgcggtttaaccatgagtgaataatgccatcacccggacgcagtgaaacccctccacgattcataataaaatcaggtaacgtgtgatgggtggttacatcaacaggttttggataagcggcggtatgacagaatgattgcataaccaaatcagcggagaaacctaagcatgctaaatctttcagttcatcacgtgtcattggccctgtagtatcttgagagccaacggaggtcattttgggttcgcaatattcaccagggcgaataccatcacgaccacaagcgcgtcccaccattttttgtgcaagtgagaaaccacgatcgctttgttccactgctttggcatgacggaataaagtgctaggtggtaaacctaaggcgctacgagcttttgaggtcaatccacgaccgatgatcaaaggaatacgaccacccgcacgcacttcatcaatcagtacttctgtttttagtgcaaaggtttccaataactcattggtttcatggttacggatttcacctttgtatgggtaaatatcaataacatcgcccatatttaatttagaaacatcaacctcaataggtaatgcaccggcatcttccatcgtgttgaaaaagataggggcaattttgccacccaatacaaccccaccaccgcgtttatttggtacataagggatatcatcccccataaaccaaagtaccgagttggttgcagatttacgtgaagagcctgttccgacaacatcccccacataagccagtgggaaaccttttttattcagtgcttcgatttgtttaatcgggccaacactacccggttggtcgggttcaatgccttcgcgggcattttttagcatagctagagcgtgtaatgggatatcaggacgagaccaagcatctggtgctggtgataaatcatctgtattggtttcccccgtcactttaaacacggttaccgtgattttttcagcaagttctggacgttcagtaaaccattctccatcagcccaagattgcataatttgtttcgcgtaaacgttgccagctttcgctttttcttcaacgtcataaaagctatcaaacatcaataaggtatgagaaagtgcttttgccgcaataggagccagtttgtcgttatctagcgcttcaattaatgcatggatattatagccaccttgcatagtacctaataattctacggctttttctggcgtgataagcggtgatgttgtttcaccttttgcgagagccgttaaaaaaccggctttaacataagcggcttcatcaacgccgggtggaacacggttaacaattaaatcaagaaggaattcttcttcgccttttgggggggactttaatagctcaacaagtgcggctgtttgtgtggcatcgagaggttttggaacgacaccttcagctgcacgctctgctacgtgcttacggtattcttctagcacgactttctcctcgcttctttgtcattttgtataacccggctgtctgcaccctatctagttggatgccaggtcagaggatcttttgctcgcataaaacatctatggttgtgaaattatgcccagctaagggctatcagcatagcaaattttcaacactatgttaattcgttcacataaaagcaacatacaacaaacgtaaatctcaccttattcatattatgacactcaatctaataggcatttttcaccagcctcgtttttaccaataaactcagttaataaatagatatcagtgctactcggtaaacgtaacttatcttgtaaattaaagtcatttgatttaagtaataaataactagaacaataaaccttacacatacatcctttagaattattttaaatagaatgcttataaaaataaacccaacatcaccaacaaataaaaacttaatcaataaactactataaaccccatataataattattttttgatagagttttaaaatctaacatattaatatgaaatagcattaccatgctaattatttaaacaataatttcattaagttcatttacaaatagcacttagcaattacgttcaacctttacatttaaaaaaagaaaattatcgatttattcattaaaatgattaattatatggagaaagtctttatggcaattaacgaaaaatttgtccaagaaatatcaagcattaattataataatagtatattttcactctattttgtcggtcaagatcctcataaaatagcacaaggtatcatgccagaaaaagatgaagaattagccctaaagtaagtgatccacattcctgcttctggttttatttatatggcttcaataattaaaagcatgctggaaaatccatgcataaacaaagagtttgaaaagctaattgcagcagatctacttcctattcttcaaaatgaaactaatatgactgaaaattttactgcccttcatttaataaaaaaaacaaataatagaagaataattttatagaagaacttattcatcataaattaactcttaccctgtttattaataactgaaataaatacaactaattaaagagaggaaacgattatttacaataatcttctctcttcaggttttttgtcttaaaaaagacaattcagtcaagtcagacgctagaagggtatatagagatgctagaactactgtatttaaaaattactgtactttttattaaaaataagtttgagggaaaatgatgtcaaaaattttaaaagatttagagtttacttttacaggaaaacgttatggtacagatggaaatgacgatattgatgccataggttttggagggatcatttatgcaggaaagggacacgatacaatcacagtcggaacatttgcagttaccgcttacaccggagacgggcacgattttgtcagagggggaagtgcttatcttaagattattgatgagaacggtgatttagatgtcagaggattaaatgcatggggagaaattgaaaagtccggtcatggcgatctgaaatatgttggtgcttctgccgcgattaagattaatcatactggatatgaatatggaaatatcaattattcaggagctgctattgcaaatatcatcacccgtaaaggcgcaattagtaatatcaactaccaaggtgctggcggttacaatcaaatttggcatgaaaccaatactggcaatatgacgtttaaaggggggggaggctataataaattggttcgtacttggtttaatagctatcaaaattcaaaaggaaatattaattttgaaggattaggcggaggcaacggaatcttctctcgcgttgaaacaggtgatattaaatttaccggaggtggcttagaaaacgtcttaatacgcgaaggtaaatcaggcgatatctttatgtatggagcaggagccaataataggcttacacgtatcagccgaaatactgatacctataaagaaacaagtggcaatatctatttttcgggggggggaggttataatcatatctattccaatatagcacaaggcaatatcacattttatggagctggggcttacaatgagatcattcgtacaactcaagttcatcctcataatgatttattagttgaatatacgaaagctgaaaatatttttctaacaagtgcttatatgttaaatctagacttagataaaagtattaattttctaacaagtgataataagcaaaatttcgaatccggtaaacctgttgaagtaaaagcgattaaatcattgcgagaaccaaatacttatttgtttaaaacaccgggcccaggggataccaatttattcatatcagactatggtcgtcgagattatacctttaataaagtcaaaatttacaatgatcctgaaacgggaaaacttcaatacgattccgaactttggcgtataacgcctgatagtggggacattaggaacatacgttttgataaaaaaaattttgaggatacctataatcttagtgtggtcaataattgttggaatacattagaaaaacaagaaattatcgaatcaccacgtttcacaaaaataaatgctgatagccactatcaattatctaatttaaaagtatttcaacacattaatacagaacaaatccaaagaaagtctctagaaacaatcaagttgggcgtagcacaagaactttttaaagacgataattctgctgaatgctctggtgatatcaatttcacaggtggtggcgctggtaatgtcattaaatctgatgttacacaaggtgatatcaattttacaggtggcggcatagcaaatgtaataaaacataactctaattatggtaataccaactttactggtggaggcgcagccaacatcattgtaaaaaaaggtcaaagaggagacctaacatttgatggaggaggattagcaaatgtcttactacatcaaagtaaagaaggaagaatgaacattaatgctactggtgccacgaatgtattaatccgaattggtgacggtgaatataaagcacatcttacggcattagggaatgtttctattcacaaaggacaaggtgatagtcatatcacaatgttaggaggattaaatacccatacccagattgatagtcatcagcgtgataaggctttatggcgagcattaggcggacttaatgtcatgacacaagtcggtgctggtactattacatctttactcggcggcggtggaaatgtcctgactaaaatgggtgaaggcgacctaagtagcatcatgttaggtggtgctaatatcattacacatatcagcaataacaaaataaaatcaaatacttacactatcaccctaggtggattaaatattttaacaaaaaaaggtcaaggtgatattttagccataatggggggaggtggcaatgtcctaacacatatcggaaacggtaacatacatggcgttatgcttggaggtgccaatatcttaactaaagtaggtaatggtgatctttcaggcattatgctaggtattggtaatgtactaacacatgttggcgatgggcaaaccctaggtataatgggcgctgtggggaatattttcactaaagtcggtaatggaaccagtatgggtgccatggtcggtggtggcaatatattcacccatataggtaatggtgaagcttgggcactaatgggaggtttaggcaacgtctataccaaaataggcaatgggaatactttggcactaatgatcgccaaagggaatgtgttcactcatgtgggtgatggaatgtcggttgctctaatgttagcgataggcaatatagccacaaaagtgggcgatggcatgacattagctgcaatgattggcagtgctaatatttttactcacattgggcatgaagaaacctttgctgcaatggtgggtaaaggtaatgtccttaccaaagttggcaatggattaacattgggattaatgctaggtgtggctaatatttatacccatgtcggtgatggcattagtattgggctgttttctggtaaagcaaatatcatgaccaaagtgggtaatggaaccacattatcagcgatgtttggcaaagccaatattatgacccatatcggtgatgggataactggcatacttgcattaggccaagccaatatcataacaaaagtgggtgatggcattgcgggaatcattgctggtgcgaaaggaaatatcgttactcatgtaggtgatggaataaccgctgcgatcctcggcggaaaagcgaatattttaacaaaagtgggtgatgggctcaccgtaggtctgctgatttcaaaggtgggaaatattatgacccatattggtaatagcaccacgattggttttgccaaaggcaacgccaatatcatcacaaaagtaggctatggtttaggcattaatgcggcatggggtaaagctaatattttcactcatatcggcgatggtgaacgatataacttcgccaaaggaaatgccaacatcattaccaaagtaggtaatggacaagaaacctctgttgttaaaggtaatatcaatattattacacacgtaggtagtggaaataattatactggtgcatggggcaatgggaatgttgtaacacaaattggtgatggtcgtcaggtcgccttagcaaaaggtcatgcaaatattgtcactatgctcggaaaaggtgacaactatggcatagtttggggtaaagccaatatttcgacaaaagtaggtaatggcacgcaagtcaccatagcaaaaggccaagcaaatattacaacaaccgtaggtgatggcctaggtgttaccgttacatacggcaacgcaaatatcaatactaaagtggggaatggtgtatctgtaaacgttgcttgggggaaatataacgtaagtaccaaagtgggtgacggcttaaatgtttcggtcatgaaaggtaccgctaatgcaaatatccatgttggtaacggtttaggtattaacgcctcttacgcaaaaaacaatgtcatcgttaaaattggcaatggtgatatctacagcttatcggttgcttctagtaatactcaaagtaataaactcgctactttcttcggcaatataaaacagagtgtacttggtgtggtcgggagtcaggctattaactatttagtacaaggtgatgatgtaaccacttccggctcccgcaaaggcaaaggcgctattcatttaattgaaaaatcttcaatcgacggtttcaaaatgaacaaaatcgacgaagtgaagagtaacattgatataaatttaaaaggtcatatcacagaggtagaaacccctagtttaagtgatgttaatacagatgaatccaacttaaccaataacagtccgaatttgatcataaatggtgactttaaacatggatttaaacctgtaacagaaggttggaatattgcatatactcaggataaaattacagcaattagccaatatggacatagagcctctattgatacaccaactaatactaataataaagattattgggatggtggacttatagcagaatacaaggaagaatatgaaccaaatatcgctatatatcaagatattagtggtttaatgcaaaatgaggtgattgaattaagttttgagtatgaacgacaagataatacgccaacagagaataaattaagtgttatctggaatggtgaggttgtcttcacttcatcaagtgatgataagtcaatagcatggcaacaacaacaaattaaattaaccgcaaatgcagaaaataatcgtcttatttttaccattccaggctctgatggcttgcaaggaaataattacagactaagaaatattgtcgctaaatcagctgtagcaaatataaacaagcatatctcagattctgatgcgacaaaaaatgccctcgctgacaaaaagaaggcagatgccaatcgtcaaaaactaactgatgaaaaacaacgcctattagaccacatctctaccacacagactgaacttgaatcgaccgatcaccttgcactggagaaaaacggccatagagaacgcgatgccattcttgaagaagctaattcagtaacacacaatttgaccacagttggtcaaacactggaagtactcagcgaatattcacaagatgcccccccctcagatcaaccatggagtgagccattcgcggaaggaattttaaaggatgtacagaagagcttaattaatactaaaaaaattgtttcagtgcctgttaataatattaaaactcagtatgttgcaaaccttacaaaggtgaaaaaatcgataaaaaaatcggaatatggcgttattcaaagtgaagaacattgtcaagaagtgcaactcgatacttccaaagcaaaaaatgatgcagataaaagatactcagacgcgatagataaaaaaaatagtgctcaaatggcagagaaaaaagcatcaaccatggtggaagatgcgagatcacgaggagatacggagcaaaaaacagcgactagcatatcggataaagcacaaaaagaagctaaatctgttcaactgaaagaaagtgataaacctaatcgtcacagggcgcatggtagcggtttatccggagaagcggcctatgtagagggggctgatgataatccatccagttatatcaaaccaatatcaactaaaaaaaatgatggtcgtttcaataataaactgacaacatttaatcaggaattacttgatgatgctcagcaagccattaatcgtttaagcattaatgctgggatccgacaaaaatcggcaaacgttcttccctcttttacatcagaccttaatggagatgacgtagcaacctatcaacaaccttctcttcgttcaggcaatcttcaatatcacaaaataggagctatcgcggtcaatctttctggattaggcgaaagccccatttttgaaacgctaaaacaaaaattcaatgtaaaaattaagaatagaaatacttactttacttttattttggaaaaaaatagtggtcgtatccaaaaaaatatttatttggataacatcaatgatcccactcagcaaaaaataatagaacactttattttagctaattattcaaattttgaagcaatgcctaatgaacttcatttagaaaatgacaaaattaaatcaagtcataacaacaaagataggatacttgcagaatacgtagaacataaatggcaaatgctaactgattcaaaagtcatgtcagttgatgaactacataaagttgcaagtgttaaaggcaaaatacaaggcgaaagttataaatcaatcattacaactctctcggaataccatgaaaaagaatcgaatacaaactgcttaccaatagagaaattgagagtgctagctcagttgcgaaaccaaattgatggttacctattaggacaccccgactctgaacgcaatgatggattgaaacagttacaaactcaagtcaatacacgttataaacacgcatcggctttaatacaagatagtcacaccatcaacgctgatagcagctttagtcgcttatacgattcactttcaaatgccaatttaaaaagaagtaaacacatttatattgatattaacggacactttgtcactgaaggaaaaaacaatctgcaagggaaaaatagactaaccagcggaaaagaagtgattgagcgagtaaaaaatgccgtagaaaaagaatatggcgcaccgattgccaataaagtcttcagtcaatttgcaaataatgaattcgctgaaaacggcgagggtattgatgtttcagggttaaaaaaaattcacagagctattgagcgggaactatctcctcatagtgcaaccttatatatctggaaaccaagcaatcatagtaatttgggacacgccacactacaaataggtcaaggtcgcttactgttaaacacagaagacgcacaaaataatcataaagaaaactacatcagttggtggcctaacaaggcgaagtcatattttgatgtgatgggagtcccctcacaaccaaaagagtcgttagcatcggatgttgcagcagaagaaaatgatggctttggtttaaattacaaatataaagaactaaacagatatgaccgactcatgaatattgcgaaaggtgaaacggtcaccactgcagatgatttatctcttgcagacgcaaaaaatatattgacgatcccaaattatatagaaaattcaaaaataccgcgaacaattggacagccttttattgatgaatgggtaataactcagaaaaaactcaacaacatcgccacaaattttctagaagctgtacaaggtaaatttagtggaaataccataactataaatggtgccatgatactattgacagagcccacgttactatcaaaaagaaaaatcccactttctgttgcacagccttttattgaacaatgggataatataaaaacacaacaagaagatatatctattcaattattaaaagcgatgaagacttggatacaagaaggtaaggatccaacgttaacgaaaaaacgaattgctttagtagaaaacgaatttgctgagcaaaaacaaaaaagtattgacagatttaaaaccagcttacctgatgaaggacgagtattccgtattaatttagaggggttagacgttgctgctatgcaagctgaatggcaacgaattaaaaattcacctaatggtcgttatcatttattaacccaaaattgttcgagtatcgtagcgaaaattttaaaagcgggtggcgcagatgaactgattggctataactggcaacctaaatataatatttggacaccaaatcaaatgttcgcatttgctcaagagttacaagaagcgcaaatggcacgacaacaaagtagaatgattccacctaacttacacgcgttgtcaggttctgaaaatatccgtcaagagctagaaaacacctcccctcttatttctgctgaacaaaagctcaatattgtttttagtgaacaggaaacgggttttctactgacacaagcatcagatgaaacgaatgaaaaatttatttatataaaaaatggagataatcaagaacaacaaaaaataatgagtaattttatactcactcattatcgtgattttgactctatccctgagcaactttatttcttagataatacaatcgtgtcactcgataaaaaccattcacgaatattatcagaaaaagtcggtgaaaattggcaacctgttgcctattcgaatctaatgactgctgatgaattaacctccgctgcagaggtgacaggaaaagcacgcggtgaaaattataaagcgatcattcaatcgcttagagattatgaattacaaagtacaaatacaaacaacacaccaatagatatatttcagcaactatccacattacgtatacaaattaatagttatctgcttaaacaccctgattcaaaacgtaacgaagcattgcaacaattacgcgaccaagttgatatacgttataaacatgcttctatcttattaagtaatagccagcaagttgattcaaataatacttttagttatttatatgagattttttcaaatgctaacttaaaaatcaacaaacatatttatcttgatgaaaacggcaactttgttacaaaagggaaaaataatttacaaaaccaagacaaacttatcagtggtaaaaatgcaatcacaagcattaaaagattggtcgaaaaagagtatggcagtgaaattaccaatcaggtatttaatcaatttacagaaaatgaatttgcccaaaatggccatggtattgacctgtcaggattgaaaaaaattcaccaagcaattgaacaacaagtttcaccaatcagttctacactatatatctggaagcccagcaaacatagtcgcttggggcatgctgcgctacaaataggttctgggcgcttacaattagatagcgatagtgtgcaggataaccatgataataattatgtcagttggtggcctgccgggagcaaatcgctcgcaaacccactgaatattacaacagaaaaaaatcctgatttaaaattacgctggtatgatttaagccaaccagtgagtcgctcaacaaatttcatgactttacaaattgatattcaagaagaggaaaagacgaatttcaaattaaataaagatgaaggggaaaatgacagacagttaaaagaatttagagataaaacgaatcttacccgaggtctcgaaaatattacacctgaaatcgcaggcttactgttgaaagctcctcatttgataccagaaacacttatcccacctgaaatttcacacccctttattaaacagtggaaaagcccaaatagtaatctacttgaagtatcaacaaacttttcaatcgcagtgaaaaactggctaaaagtcgcctttccaacagcgatgattaaccaaacctttgcattggaaatcaagaaaattaaagaaattgaagaccgaaaaacagaaaatttcaaaacaagtgtcgctgatgatacaaatgatggcgtggtgtttcgcattaatctagagggacttgatgccgccgccatgcaaaaagagtggaagcgcattaatagccagtctgatcctcgttaccaattattaaccaagaactgttctagtattgttgctagaatattaaaagcaggcggagcagatcaactgattggtcatcattggaaacctcgatttggcatatggacaccaaatgagttgtataaattttctcaaaagatacaggaagcacgcttagcccaaattgcggtacaacaaggcaaacctatacattctaatttacaagcattatcagaccacaataaagtggctattgataatgacggtacatcaccaaacgagagaaaaaatcttagcccattaacacgtttttttaatgatcattttttcggcagctatgaacgtcgtagagacatgacaacggtgatgagaataaaaaatgaagaaaaaataacattaaaaggggatgcaggccgtcttacaggatcatattacagaggaaacgacaatattccagaagctaccgataagaaagtagtactatttttacatggttcaaattcccctaccgaaaaacaatcctctagtttttatcattattataaccaacaaggcatcgatatgttagcgattaacatgagagggtttggcgaaagcgatggctcgccaacagagcaaggaatgtatgctgatgcacaaaccatgttccgttatctcgttaatgataaaggtatcgatcctaaaaatattattattcatggttattccatgggggcaccaattgcggctaaattagccagcgatatttcagctaacggtcagcatatagctgggctattcttagatagaccaatgccaagtatgtcaaaagcaattgaatcttatgatgaatatagccttaagaaattgactggacaactcgcaaaaaaaatcaatggccaattctccgtagaaaaaaatctacagggtttctcaaaagatatccccattatattgctcactgactgtggcgagctgggcattggtggtgaaaaaatgcgcactaaattacttgataaaggatatctagttaaaggagaaagaaccgatgtttctcatttagagagccttaagttgatgaatcaatacggtaaacaaataatatcaagtttactatccccagagtatgtaaataacaccaatcacagaaatgcgttagattcgatacaaaacccgataaaaaagaataaggtgactgattgggggatggtatatgtaaaacccaatgataatgggggtgatagtcgttttgatagccagattattatccaaacagaggatgatccgatagtcgctcaagcagcttcggcacttgccgctaaacatgccaaaaatagtatcgtggtacaattggatgccgatggtcattaccgcgtagcttatggcgacccagcacaactttcaggtaaaatacgttggcagcttgttggccatggtcgtgaaacaaccgaaaataatcatttacgccttagcaactacaatgctgatgagctttccaatcaattggttaaattcaataccgtattcagcaaagaaaataatatcaatacaactcctgaacatatcagtattgtcggttgttcattaataagtaatgacaagcaggcaggatttgcccaccagtttatcaatgcattagatcaacaaggcattcgtagtagcgtttctgctcgagtaacagaggtcgccgttgatagcaatggtcacaaatacaccaaagataacaacggagagtgggtagccaaacaaacccaaaacaaggtagtgttagattggaataaagaaggcaaaatcacgactgaatttgagcaaatacataatggtgttgctgaaggtgatattgatttgactaaagtaggtgcttcagctgacaacaaagtacgtggcgcaattgcagataataatgaagtctttaccgcccccaaaaaaggtaaaaaatcaaccaaacaaagctcatcaggaagtgataattcatcactaagctattctggcaatatccaagtcagtgtgggtgacggcgagtttacaacggttaattggggaacctctaatcttgggatcaaagtaggtactggcggatttaaatcactggttttcggtgataacaatgtgatggtacacgttggtaatggtgatagtaaacatagtgttgatattgctggctatcaagctttcgaaggtatgcaattatttgttggtacacgtaacgtcagctttaatctggggcgtagtaatgatcttattgtgatgttagaaaaatcaattccaacccctccactgatcaacccttttgatggtgctgctagaatcaccaaagttctagagtcaatcgcatgctcaggtgaaaataatgataatgattggttgtcggtacaaaacgatcagtggacactcgctggcgctaaaaaatttgccatagatatgtcaggaatagaccaaacgagcaatgttgactataaaacactgactgatctgaattcacagaataagcgtagtagccgtggattaaagagtgatctagaagccacactaaacaaaaaatataaccagtggttaggtggtagtggcaataacaacgagatgggaaaaatcagccgagctgagcaacttcgtcaactagatagtaaaatcgcttttaatttcgccattggtggtcaaggtgctgatattcaagttactgccgggaattggaacttgatgtttggtgataatatccagtctattatagacactaatcttggctcattatttggcttaatgacgcagcaatttacagcaactggtatggtggaaaccacctttacttataccccccaaaacttaccaactaagttaaaaaataaattgctaggtcggttagccagcgtgagttcagacacgactctgggggatatttttggagtagactctaccacagatggaaaaataatctctcgtaatggtgagcccattgatgttgtcgctattttgaaagatatgctcgctgtagtgactgagtttggaggtgaaaaactgtccgcatttactgatccgactaaattattagataacctccaatcatctattaatctgggcaaggatggtattatttcatttgctgaaagccatggtttaaaagaaaaagcgacagaagatcaacaaaatgaatctgaagtttcaattaatgcccaaacaccaataacaacgagtcaaactgaaaatagcaagatcacagaggaaaatgatcgccctttcggcttcaattcgctaaatatccccaatctatttgccacaatctttaataaagataaacaaacagatatgcgtgatctcgcagaaaacctcaaagaaaatttagcagctgatgtactgaacatggagaagaaaacgctcgatttcttgcgtaatagtggtcatttaaaaggcgatggtgacatacatgtctctcttggcaactataatttcaactgggggggagatggtaatgatctcggcgcttacctaggagataataataatttttggggtgggcgtggttcagatactttctatgcaacggggatctcaaatatttttactgggggttacggaaatgatctcggcgtcttgatggggcgctcaaacatgatgtttggaggcgatggagatgacactgctattatcgccggtcggatcaataatgtctatttaggtgacggactcgataaagcatttgtctttggggaaggcggtgaaattcacactaatgcaggtaatgactatgttgtcactaccggtaactacaatcgcattttcagtggtagtgaacaagattttgttgtcacaattggtaaccacaaccaaatatccttagaagaaggcaatgattttgccaaaatttttggtaactacaataggttgaatggagggggcggtgatgacgaaattcaactaatgggttatcacgccgtagttgatggaggcgatggaaatgatcaactaattgcagcttcattctcgaaatttagccttcttaatggtaatacaggtaatgatattatcatattaggtggatatcagaaccacttcaaaggtggaaacggtatcgatagcttcctgattaataataatgtgattgattgttatatagacgatattagccaagaagataatattgtacttggagatattgattggaataaattatggtttgaacgcagtggctatgatttaaagatctcacatattcgcttcccacaaaatacaggggaacaagccacatttgagcgcattggctcaactacttttactgattatttcaatggtaatcaggcaaaaatcgttatcgcaatgactgataaagatcactctgatcagcgcgaatatacggctttatcaagcaatgcactcgctattcaaattcaggccatgagtacatttcctatgaaggcaggcgcatccggatttttcgataatataagtgatgaggctaaacaaatgatagccgtagcttggacagatacaatttcaggaaaaggcatattagtgtagtttagccatactctataactataataaatcctctccgttggatgtgaactgtgacgcgagaggtttttatcttaagagtactctcaatggaaaaataatatcgtatcaaattaaattcctatgttgtttaatccatcataatgaaaaaagagccaagctcataatgaacttggctcttaacatttacactttgtcttgattataaaatcaacttattttttctttttcgcttttggatttggcaggtcagtgatgctaccttcaaatacttccgcagccataccgattgattcgtatagcgttgggtgagcgtggatggttaatgcgatatcttcagcatcacaacccatttcaatagctaaaccaatttcacctaacagttcaccaccgttagagccgacaattgccccaccgataacacggttggtttctttgtcaaaaatcagtttagtcataccatctgcacagtctgatgcaattgcacgaccagatgctgcccaagggaaagttgctacttcatagctaacacctttctctttcgcttctttttcagtcataccaacccatgcaacttctggctcagtataagcgattgatggaataactttaggatcaaagtaatgtttcttaccagagataacttcagcagcaacgtgaccttcatgaacacctttgtgtgccagcattggttgaccaacaatatcaccaatcgcaaagatgtgaggtacattagtacgcatttgtttatcaacatggataaagccacgatcatcaacttcaataccagctttacctgcgtctaataatttaccatttggtacacgaccgatagcaactaatacagcatcataacgttgaggctcagcaggtgcttttttgccttccattgtgacatagataccatcttcttttgcttcaacggcggtcactttggtttctagcatcagattgaattttttgctgatacgtttagtaaagactttaactacgtctttatctgccgctgggataacttggtcgaacatttcaaccacgtcaatttgtgaacccaacgcatgataaacggtacccatttccaaaccgatgatcccaccacccatgaccagtaaacgctctggtactgttttcagttgtagtgcatctgttgaatcccacacacgtggatcttcatgtggaataaaaggtaattcgattggacgagagcctgcggcaacgatagcattttcgaaagtgattgttgttgtaccttcactaccttcaacagacaatgtatgtgagcctgtgaatcgagcttcgccgttaacaacatttactttacggcctttagccatgccagctaagccaccggttaactgagaaataactttgtctttccagatgcgaattttgtcgatatctgttttcggtgcatcaaaaacgacaccgtgttcagataatgctttcgcttcttcgattactttagcaacgtggagtaacgctttagaagggatacaccccacgttcagacaaacaccacctaatgtagagtgacgttcaactaaaactgtatctaaacctaagtcagcgcaacggaacgccgcggaataacccgcagggcctgcaccgagaaccactacctgtgctttaatttcagtactcatcgtgacctcattatttatttgtccggcgagtcagacgataatccatatttaacaccgagacttacataccgcatgcagtttacagaaatgttaataaactgaaaagcgctctaacatgacagatctcacaacctagaatgtatgactgcaaaatctgtcacggcaatcagagaaaccggcgcttagcaccggtttagatgattacattaccaaacgacgtaaatcgctcatgtactgattaatcagagtgataaatcgagcaccgtcagcaccatcaatcacacggtgatcgaaagataatgacattggtaacattaagcgtggtacgaactctttaccgttccagactggtttcatcgaagaacgagacagtcccataatcgcaacttctggcgcattaacgattggtgcaaaaccggtagtaccgataccaccaaggctagaaatagtgaagcatccgccttgcatatcagatgcagtcagtttacctgcacgagctttcttagaaacttctgctaattcataagagagttctaagatgccttttttgtttacatctttaaacacaggtacaactaaaccgttaggtgtatctacggcgataccgatattgatgtattttttcaggatcagtttctgtccatcttctgaaattgagctgttaaagcgaggcatatcagccagtgctttagccgctgctttcatcacaaagactaatggcgtgatcttaacatccagttttttcttctcagcttctttattttgctgtttacggaattcttcaacctcagtgatatctgcttcatcaaacagattaacatgagggatcattacccagttacggcttaagttagcgccagagattttctggatacggcttagttcaacttcttcaatttcaccaaatttactgaagtcaactttcggccaaggcaacatacctggtaatccaccaccagcattagcaggtgcagattcagcacgtttaattaactctttcacataagactgaacgtcttcacgtaagatacgtcctttacgaccggttcctttaactttcgctaagttcacaccgaattcacgtgctaaacggcggataacaggtgttgcatggacataagcttcgttttcaacaaattcttcttttgctgctggtgcagaagcaggcgcttttgctggagcagaaggtgctgctgatgtagatgctgcaggcgctactggcgcttgtgctgctggtgcggcaccggcaacttcaaaggtcatgatcagtgagcctgttttcactttatcaccgacagcaattttgatctcttttactacaccggcaaaaggtgctggaacttccatagaagctttatcaccttcaaccgtgatcagagattgctcttcagcaatggtatcacccactttcaccatcacttcggtgacttcaacttcatcaccaccgatatctggtacattaacatctttaattgcagaggctgctggtgctgatgctgcaggagccggagctgatgcagaaggtgctggcgcgctacctgctacttcaaataccatgataagagagcctgtgctcactttatcaccgacagcaattttgatctcttttactacgccagcaaaaggtgctgggacttccattgaagccttgtcaccttcaaccgtgatcagagattgctcttctgaaatggtatcacctacattgaccatcacctcggtgacttcaacttcatcaccaccgatatctggtacatgaacttctttcagttcgctcgcagcaggtgcggcagcagaaggcgcaggagcggcttcttgagcgggtgcctgagcaccctcttcagtatcaaagatcatgataagagagccagtttcgactttgtcgcccacggcaattttgatctctttaacaatacccgcttgtggtgatggcacttccatagacgctttatcgccttctacggtgatcaaggattgttcttcctcaatacgatcaccgactttcaccatcacttcggtgacttcaacttcatctgcaccgatatcagggactttaatttcaatagacattcactttacctcttacgccagacgtgggtttactttttcagggttgatgttgtattttttgattgcttcttcaacaaccttcacatcaatctcaccacgtttagctaattcgcctaatgcagcaacaatcacataagaagtatcaacttcaaagtggtgacgcagattttcacggctatctgaacgaccgaaaccatctgtacctaagacacgatagtcgtcagctggcacataagtgcgaacttgttctgcaaacagtttcatatagtctgttgaagcaacagcgggtgcatcattcatgatttgagcaatgtatggtacacgaggctcttctgatggatgtagcatgttccaacgttcacaatcttgaccatcacgagccaattcagtgaatgatgttacactgtacacatcggaaccaataccatattcagttgacagaatttgtgctgcttcacgtacgtgacgtaaaatagagccagaacccagtaactgaactttacctttcgcgccttccagagattccagtttatagatacctttacggataccctcttctgctccagctggcattgctggcatatgatagttttcgtttaacgttgtgatgtagtaataaacgttttcttgtttatcaccatacatacgctctaaaccatcttgcataatgacagcaacttcatacgcgaaggccggatcgtaagagatacagttaggaatagtcagtgattgaatatggctatgaccatcttcgtgttgtaaaccttcaccgtttagcgttgtacgacctgaagtaccaccaattaagaaaccgcgtgcttgttggtcacccgcagcccaacataggtcaccaatacgttggaaaccaaacattgagtagtagatatagaatgggatcattggcaagttgttagtgctgtaagatgttgcagccgctaaccaagatgcacccgcacccagttcgttaataccttcttgcaggatctgacctttaacgtcttctttatagtaagcaacttgctcacgatcttgaggcgtatattgctggccattcgggctgtagataccgatttgacggaacagaccttccataccgaaagtacgtgcttcatcagcaataatagggactaaacgatctttaatagatttgtttttcaacattacgttcaacgcacgaacgaatgcgatagtagtagaaatctctttagattgttcttctaataactggctgaaatcttccagtgtaggaatttctaatttttcatcaaaacgagtacgacgagcaggtaagtaaccttctagttcctgacggcgagcatgcagatatttgtactcttctgaatctttatcaaaagtgatataaggcagttctgctactttctcatcgctaacagggatattgaaacgatcacggaaatgtttcacaccgtccatgttcatttttttcacttggtgagcgatgtttttaccttctgccgtttcacccataccataacctttgatggtctgagctaaaataacggttggtttatctttggtttctttggctttttggaatgccgcaaaaactttcttcggatcgtgaccaccacggtttaacgcccaaatttcgtcatcagtcatatctttaactaatgcggcagtttctgggtaacgattgaagaaatgctcacgaacataagcaccgtcgcgagatttgaaagtctggtagtcaccatccagtgtttcattcattaactggatcagtttaccggaagtgtctttacgtagtagtgcatcccaacggtcgccccacatcactttgatcacattccagccagcaccggcgaagataccttctaattcgttaacaattttgccgttacctgtaactgggccatcaagacgctgtaagttacagttaaccacgaagcacaagttatctaatttttcgcgtacagcgatagtgatagcacctttagattctggctcgtccatttcaccatcacctaagaacgcataaacacgttgcttagtggtatcttttaagccacggtgatctaaatatttcaagaattttgcttgataaatcgcagatagtggccccaagcccattgaaacggttgggaactgccagaattcaggcattaatttagggtgtggataagaggataaacctttaccaccaatttcttgacggaagttatttaattgctcttcagtcagacgcccttctaagaatgcacgtgcgtagatccccggagagatatgaccttggaagtaaactaagtcaccgccatcattgtcattatgagcacggaagaagtggttaaagcaaacttcatataaagttgcagaagactggtatgacgccatgtgcccgccgagttccaaatcttttttggacgcgcgcagaaccatcattactgcgttccagcgaatagcagaacggatacgacgttccaattccagattgccagggtaagcgggttcatcttcaacaggaatagtattgatataatcactgtgtacagagccacctaaagcaatatcaagaccgccattacgggcttgttttaatacctgatcaatcaggaactgtgcacgctcaacaccttcttcacggatgaccgagtcgatcgcttgtaaccaatcgcgagtttcgatcggatccacgtcatttttcagcatatctgacatggtgtattccttatctgttatctgtttctaatggttataggagcctatcttcccgtgataccacggggatatgacgggaagataggccctgctgttattaccgctacccctgaatattgcagggagataggtagtacagactcagcggtcaggatctgtgctactaaaataaatcaggatgttgttggagccggcgtaaagaacgctcacgacgagtatgttcacgactcatatccaacaaaacatcttcaataaaggccagatggcggtgtgaagcttcacgggctgcttctggctctctattaataatcgcctgataaatctgtgtgcgatgctcacttacagcagttaacatctctttacgtgtataaagaaactcaaaattttgtcggatattctgctcaagcattggcaccatacaccttaataagtgtagcaaaacgacattatgagcagcttccgtaacgattaattggtattgcaataccgcatccgactccgctgcgatatcccctttatcatgagcatcaataatgcgagcatgactggctttaatacgctcaagatcatcatcagtaccgcgtaatgcagcataataagccgcaataccttcaagggcatggcgtgtttctaacagatcaaattgagattctggatgcccactgaggagttgagcgagaggatcgctaaagctttgccaaaggttatcttgcacaaaggttccaccaccttggcggcgtaataaaaaaccttttgcttccaatttttggattgcttcacgcaatgaaggacgcgatacatcaaattgctttgccagctcacgttcaggcaggagtttttcccccggacgtagggtgccttctaaaataagatgctcaagttgttgttctatcacatcagaaagctttggttggcggatctttgtgtaagccatattgctagaagccattattggataactattaccttggttattgaaatgtcaattggtaataccaatttaatgtaatggataataaagtaacaaagtatttactaactgtccatacagttgttgagcgaaatcataaaaacctgcaaattttaacaaattatttgataaattcatcaaatttgataactagatcgcattattagaaaagattaaaaacactattttttaacattgattaaacacataaacagtcacactgaagcgtgacagcattcatatattgattgtcaatgcaaaaatatcaattattaatgcattttgttgtgttattttgctaatagtgctcggtaatatgaccaattaaaatgaggtcccggatctgttttccgaccaggtgcgacatcactatgtccggtaatattttctttaatgcccggatagtgttcaataagttgctgagtgagtgtcgataattgctgatattgctgcggcgtaaagtcacactcatcggttccttctagctcaataccaatcgagaaatcattgcatttctctcgccctttatagaaggaaaccccagcatgccacgctcgtgccgtaaaaggcacatattgcacaatttcaccatcacggcgaattaaacagtgcgcagaaacacgcagatgtgcaatctcattaaaaaaaggatgatcatcaacagcaagcgtattggtaaacagttgatcaatataaggtccaccaaattgcccaggaggaagactgatattgtggataatcaacaatgaagggatttcaccttcaggtctattgtcataatttggcgatggaacgtgctttactcccgttagccagccttgcttaatctccacaacacccctcttttttctacatttaaaatcatattagctatttttattaataatatccgccaattaatgcgaacttgctctcaataatagtggttaattttgtatcacgcctttttcttttcgatattttactcaattcttagcttctctattcgccaataaaacgcttttttctcatacttcaataggttatttatcaaggagagaaaaatgaatacattaaattatcactcaacagagaatggattcacgctaatggaattgatgattgtgattgccattatctcaattttaagctcagtggcgatccctgcttatcatggttatatccaaaaagccgccttaactgatgtattacaaaccctgtcgccttatcgttctgcagtggaactttgtcactatgaacatcaatataaccaatgccatgctgatgccagttttatgcctcaacaatttcgtagtcgataccttactgatattcatgttgccaatggcgttattagtgcaaaaggtaaggctcaactagaaggactaaccatcgtaatgactcctgcagcaaacagcaaagagacacttccccaatggcaaattaactgcacatcaactaacactgcgttacaaacgctatgccataaggtttttaaatctcattaaaccaatctaacgacaacctcaaccaaggtggaaaagccaataggctctgtttctagcccttaccatccataaatcatttatcgtaaaaaagagctttcatgaataatactatccatacagcaacagagtttattgagcaattgttacgtcacagccttgctcaacgtgtttctgatcttcatttagagccacaacaaaatagcctgagaattcgcgcgagaattgataatcatctagtattattttctccccctgacaatcaattagctaacgagatcctgacacgtttaaaaatcctcgcgaatattaatattgccgaaaaacgcctaccacaagatggtcaatttaattggtcttaccagaaaaacaattattcaatacgtgttgcgacacttcctactttatatggagaaaaaatagttttacggctcatgaataatctgcaacagccacaattagcacagttaggttttcaaacaattcacctaacactattaaaaaaatatcttactcaacctcagggaatgattttagtcaccggccccacagggagtggtaaaactttaacactctatagttgtttacaatatttaaataaagataatcgtaatattaatagtattgaagatcctattgagttacctctccatggcattaatcaaacacaaataacagaaaaagctggtattacttttgcaacaatattacgggcgctattacgccaagatcccgatgttattatgataggtgaaatacgtgatcaacaaacagcagaaatagcaataaaagcggcacaaacaggccacctagttttatcaacactgcatactaactctacccaagcaacactcgcccgtttggctaatttaggcatcgcaaaagatttaatcgactcttgtgtaaaattaattatttctcaacgtttagttcgttgcttatgtagcaactgtaaatacccatcacctgaacagaaaaatttcattattaataatcaacaaattatattacccaattggcaagcaacaggttgtcaattttgttattccggctacaaaggcagaacagctatttatgattgttttgaacttgccaagcaatcactcccctcaccttacgcactatttaactcaggtattgaactgataaaaaaggggatcacgtctttagatgaagtttatcaagtagtcggagatattgaatgaaattacattttatctatcgctataatgcattaacttatcaaggaaaatggctaagtggcaacgttgtcgctcaatctaaacatgaagttattgatcaacttattcaacaacaaaaattaccagtaaaaattcgcctatatagggtaataatctttcaaaatagtgataaacaataccgcattcaacttcttgaacagttagcgttattacttcattcaggcttagcacttttgcccgcattaacactgcttaaagaagaatgtcgttatttacattggcaatgtgttttaaatgatattatttttcacctaaatcaaggaggcgcgctgtctaaacagttaagtcgttatccactctattttcctgctaatttaacccattttatttatattggtgaagagagtggtaagcttgatgaagttctcttattacaaacaacacaattaaaaaaccagcgggatttaataaaaaaaataataaaagcttttcagtatcctctattcttattattaacattaatcgttattacaatatctatgttgatctatgttttacctgaatatcaatctttatacagtgcatttaatactgagctaccgatgctaacattaaccttaattagatgttctcaatggttttctcaatatagtttaattatcctgctgtttatattaataatttcttatagctattacactattaaacaccatagtgctaaatttcgcgacattgaacaacgatgttggcttaatcttccttacttgggggtcttattaagatatcaccagctacatattatttttcagataatgacgattacacaacaagctggattaccactgttacaggggttaaaaattattacagagcaattaacgcattcactgtatcaacgagcactcactgatatgatagcgcatattactcaaggcaaatcacttagctcatttatgcgacataatcctctattcccgccaatctgttatcaattgatctcttcagcagaaaattctggacaactacagtttttttgccagcaacttacccactggttttatcatcaattagaagaacgtcttgatagtgtaaaaacatggcttgagcctattttaatgacactgatcgcattgattactggcacgcttattattgcgatgtatcttccggtgttacaactaggtgataccatacattgatgctagcaatatcctaaagtcattaacaatgcgtctaataatcaaaacatcagtgatacaatgcatcatcattacattttgatatattaatagccgattaagcgaagatttagccacttactgtaagctaggctgtcagggtagcagaaaatcgcttatcataataactgaataaaacccaaatattgcggttattatcttgtgataaaaatcagtttaagctttagaatatcgcaatcaacagtaaattttgattaattaaaaatagacgaacgcaatgacttatacagttgctcttacaggtggtattggtagtggtaaaacgaccatcgctaatggttttgcctcactcggcgtccctcttgtggatgcggatgtcattgcacgattagtggtagagcctgattcgccaggattaaaagccttacagcaacacttcggtgacactattttattgcctgatggcaagttaaatagagcgcaattacgtcatattatttttcaaaatcaacaagaaaaagcgtgggtaaaccagttactccatccacttatacaacaagagacgcaaaaacaaattcaacaaattcgcgccccttattttatttgggttgttcctttattagttgaaaataaactaacacatttagccgatcgtattcttgtggttgatgtgactgaagaagaacaaattaccagaactatgcaacgtgatggtgtaagccgagatcatgtactcaaaattttacaagcccaagctaaaagagaacaacgattagccgttgctgatgatattattgaaaatcacgataatagcttaaatcaagatgaacaaataaaacaacttcatcagcattacttagaattagctcaaaaaagcaatacaggacaatagccatgagtgaagaaacctcaacaattatttttgaacacccgcttaatgagaaaatgcgttcatggcttagaattgaaaactcattaattcaattaaatagttttcaatctattaattcattatcttctgcattatctttttttcgtgccgtttcagaatttattgaagttttagatcgcggggagatccgcgcagagctacttaaagagttagaaaaaagacaaaaaaaactgcaacagtggttatcctttcctaatgtcgataaagagattgtcagtcatattattaatgagttatcagaaagtgcttgcgcattaagtaaagcaccacgtattggacaacatttaaaacaagataaaatcatcagcttagtaaaacaacgcctcagtattccgggaggatgttgtagctttgacgtccctactttgcatttgtggttaaatcttcctcaaacggtgcgtactgaaaagttaacttgttggcaggaagggttatatcctctacaaaatgcattaaatgccctattaacacttattcgtcaatcagatacatttaaaccggtattaagccataatggtttttatcaagacagtacggaagaaggtgaattattacggatcaaactacttgccagccagcaaatttaccctcaagtctcaggacacaaaaaccgttatgctattcgctttttgcctcttgacagtgagcatggcacaatcccttctgaactaccttttgagatttcatgttgttaatatagcttaatatcaacaacagaaatcatctcaattaaattcaggagagataatgagcgaaaaattaatagtgaaatgcccaacatgccgaaccgaggtaatatgggatgaaagtagcccttatcgtcctttttgttgtaagcgttgccagttaatcgatttaggcgaatgggcggctgaagagaagcgaattccaagtcaaagcgaaagcaatgacagcgatgaatggagtgaaatgccagagcaagatcctaagccgtttaattaaacgcccacagcatactcatacagccacaacaatcatgaagtggctgtattgattatttttgcaataaggcaacaatagagcgattagctggcggaaaatcttcggcatttaaggacataataggtatccagcgggaaagttgcccctctttaccgtaaggtttattttcccactctgtgactaaaaagaatgataatgtaatatgcctatcaataaaatcatgctctaccgtttcaagcaactggcattgtgtcacattaatacctatttcttcttgcaactcacggtataatgcctgctctggcgtctctttatcttctagttttccaccaggaaactcccaatatcctcccatatgagatgtcaaagggcgttgggtaataaatacattattttgcttatcacaaatcacacctgcagcaatatgtagtttttttttatctatcataaacagccttattagatcatacgtttcactgacaaacttcaccattataccgtagatccaatagtatgaggttgattttctttcttcactattcggcatctgctcccccccctgatgaacgacccgcaaaagttggactcttttcgtttaaactcaatcatcactatttattaagataaataaatagtaaaagtataaatgcttttatattttatttattaaaatgaaataattattcacagaatgaatattttatataatgaaataaataaatcactgccaacaaatgaaaagtcgcttttaacttaattaaatattttcaaaaccgctctcagtattcttcttttttctctaaaaaacctattttttggttaattgattttttccaactggtaatttacatagcaaaaatcacaacaaatacaataacaataaaaattaaacaaatgattttatttgtagataacgcttattctctctaacaaaatcatactgattattttacgtttattgatagttaatactaaaaaaaggaaaagttttacttaaatccatcaattttaaaaatatattcaattaaagagtaactggtatttattatttttaatttcaatataataataaaatattatttattatctatatatattaaagccctattattatatttgaattaatacctttatctcgaggtaaaatgaaaaaaaaagttgttttattaacactattaagctgtttttctaccagtggattaagcgcaaatgaaacaggaaatttaggctcaatcagtgaatcaaggcgtgcattgcaagatagccaacgtgaaattaatcaattaatagaacaaaatcgctatcagcaactgcaagaaaaagcggtaaatatttcacctaccccaactttaattactgagtcagaacactgtttgcctataaaaggcgtttatattcaaggtattactttacttactgagaaggatctcaattcattatctccattaccagatcaatgtattaagagtgctgatattaatcgcctcgtgaaagaactcactcagcgttatcttcaacatggttatattactgcacgtatccaatttttacgtcctaaccaacatggcgaattaggtctgtatgctattgaagggtttgttgaacgtattgaaggaggtgatcgaggtgttaacaccacactactatttcctcgaatcaaagggcaaccattaaaactcgctacactcgatcaaggcttagatcaagctaaccgcttgcaatcaaataaagtcacagtggatattcttcccggtaccgaattggggggctctgtcattaagttgtctaatcaacgaaaatcaccttggcatctcaatatcgctagtgacaattatggacagaaaaattcaggccgctggttaatacgaacgaatgctagtttagatagcccattaggtttatctgattttgtaagcttaaatgccaacataacaacagataacccgaatacccgttttaatcgcgcttatactttgctctattcaattccttatggtggttttacttttagctcttttggtagttattcggagtaccaatttcaccaaaaattacaaacacgtactgtcagcttatatggcgataccactcaagtaggtattagaggcgattatgcttttagccgtagccaaaaacaaattgataccttaaatattcaagtcactcataaacgtatacgcaactactttagccaaattcgtttagatctcagtagccctaaattaaccacgattgaattagggattaatcatttgcagattattccaaatggcgtattgagcactaatttgagtgttgaaaaagcggtcggctggtttggcgcagaggaaacaccctatatcactaacggtaatggtaacgactatcgctttacaaaagttaagctatttgccaattggtatcaacgcttttctctatggcgttctacatttttattcaatagtacttttttaggccaatacagccacgatacactccccggcgttgaatggctaagtttaacagacaaaaacgctattcgtggttttgatcaaagcacactttctggtgataacggtggctatttacgcaataccctctcctatccctatcgacttaaccacttttctatcacacctcgtataggggtagatatcggtcaagtaaaacaacatggtaactacaaaggatggcaaggtggttacggcctaagctccggcttaaatattcaatatcaacaagcacaactcgaccttgaagttgcaaaaggcgagttactgtatcaccaaacaaattccaataaaaccaaagatcctactcaactactggttaaattttcatacttattttgatctacattcatagcaacaaatggagataactctatgaaatcaaaaaactttaaactttcaccctccgggcgacttgctgcgtctttagcaataatttttgtctctcttaatgcttatggtaatggcatcgtgcccgatgcaggccatcaagggccggatgtctctgctgttaatggcggtacgcaagtgattaatatagtcacgccaaataacgaagggatttctcataaccaataccaagacttcaatgttggcaagcctggggctgtatttaataacgcattagaagcgggacaatctcaacttgcgggtcatttaaacgctaacagcaatttaaatggtcaagctgcctctttaattttgaatgaagttgttagccgcaacccatcattcttattaggtcagcaagaggtctttggtatcgctgctgaatatgtgctttctaacccaaatggtatcacatgtgatggttgtggttttataaataccagccgctcttcattagttgttggtaatccgctctttgaaaatggtcagctaaaaggctatagcaccctcaacaacaccaatttactatcacttggtaaaaatggcttaaatacaacagggttgttagacttaattgctcctcgtattgatagtagagggaaaatcactgccgctgaaatttcagcctttactggacaaaacaccttctcacaacattttgatattctctcttcacaaaaacccgtttcagcattagatagctatttctttggtagtatgcaatcgggtcgtatccgcattattaatacggctgaaggtagtggagttaaattagcaggtaaatttaccgcagataacgacctaagtgttaaagccgataatattcaaacagatagtcaagtccgttatgacagttacgataaagatggcagtgaaaattaccaaaactatcgtggcgggatcacggttaataatagtggctctagtcaaacactcactaaaaccgaattaaaaggtaaaaacatcacattagtagcgagtagccataatcaaatcaaagcctctgatttaatgggggatgatatcacgttacaaggcgctgatttaactatcgatggtaaacagctacagcaaaaagagaccgatattgataatcgctggttctactcgtggaaatacgatgtgactaaagagaaagaacaaatacagcaaattggtagccaaattgatgctaaaaataatgcgacattaaccgcaactaaaggagatgttaccttagacgcggctaaaattaatgcggggaataaccttgcaattaatgccaataaagatatccatatcaatggattaattgagaaagaaagtcgtagtgaaaatggcaataaacgtaaccatacttctcacttagaaagtggtagttggagtaatagccaccaaactgagacgttaaaagccagtgaattaacggcaggtaaagatcttggtttagatgctcaaggctcaataacggcgcaaggtgctaaactgcatgcgaatgaaaatgtgctggtcaatgccaaagataacattaatttaaacgtccaaaaaaccaataatgataaaacagtcaccgataatcatgttatgtggggaggtattggtggtggtcagaataaaaataataataatcaacaacaagttagtcatgcaacacaattaaccgctgatggtcaattgctccttgctgcagataacaatgtcaacattaccggtagccaagtaaaaggcaaccaaggtgcttttgttaaaaccacacaaggtgatgtcgtcattgataatgcgctgagtgaaaccatcagtaaaatcgatgaacgcacaggaaccgcgtttaatatcactaaaagttcacataaaaatgaaactaataaacaaacatctacaggtagtgaactcatttccgatgcacaattgaccgttgtcagtggcaatgatgttaatatcattggtagtttaatcaaaagtgctgataaattaggtattcattctttaggtgatatcaacgttaaatcagcacaacaagtcactaagattgatgatgaaaaaacatcattagccattactgggcacgccaaagaagttgaagacaagcaatatagtgcgggctttcatatcactcataccaccaataaaaatactagtactgaaacagagcaagctaactcaaccattagtggtgccaatgttgatctgcaagcgaataaagatgtgacttttgcgggatctgatctaaagactaccgcagggaatgcctctattacgggtgataatgttgcctttgttagtacggaaaataaaaaacaagcggacaacacagataccactatttcagggggttttagctacacaggaggtgtagataaagtcggttctaaagccgattttcaatatgacaaacaacatacacaaacagaggtaacaaaaaatagaggcagccaaacagaggttgcaggtgatttgactattaccgcgaacaaagatttgcttcacgaaggggcttctcaccatgttgaggggcgttatcaagagtctggtgaaaatattcagcatcttgccgtcaatgatagtgaaacatctaaaactgacagcttaaatgttggtatcgatgttggcgttaatcttgattatagcggtgtaacgaagccagttaagaaagcaatcgaagatggtgttaacacaaccaaaccgggtaacaataccgatttaactaaaaaagttacagcaagagatgcaattgctaatttagctaaccttagcaatttagagacccccaatgtcggtgttgaagttggtattaaaggtggtggtagtcagaaatcacaaaccgatagccaagccgtttcaacctctatcaatgcaggaaaaatcaacattgatagtaataataagttacatgatcaaggtactcactatcaatcaacccaagaaggtatttctctcacagcaaacacccacacaagtgaggtcgcgcaagataaacatcaaacgacattccatgaaacaaaaggcggtggacaagttggtgtcagtactaaaacgggcagtgatattaccgttgctattaaaggtgaaggccaaacaactgataacgccttaatggaaacaaaggctaaaggtagccaatttacctcaaatggcgatatttcgattaatgtaggtgaagatgcccattatgaaggtgctcaatttgatgcacaaaagggcaaaacagttatcaatgcggggggtgatctcactcttgcacaggcgactgatactcatagcgaaagtcaatctaatgttaatggtagtgcaaatctgaaagtgggcaccacgccagagagtaaagactatggtggaggtttcaatgcagggacaactcatcacagcaaagagcagactaccgcaaaagtgggcgctatcactggctctcaaggtattgaattaaacgctgggcataacctgactttacaaggtactcatttaagtagcgaacaagatattgcattaaatgcaactaataaagtcgacctacaatcagcgagctctgagcgtactgaaaaaggcaataatttatctggaggagtacaagcaggttttggtaaaaaaatgaccgatgatgcttcatctgtgaatggtttaggtagtgcccaatttgctattggtaaacaagatgagaaaagcgtatctcgagaaggaggaacgattaataactcaggaaacttaacgattaatggcaatagcgtccatcttcaaggagcacaagttaatagtaaagatactcagctaacatcacaatccggtgatatcgagatcacatctgcgcagtctactgattataaaaacaattggggaacagatattggctttaatggcaaaaaaaccaataccaccccaaaagaagttacagaggagaaacctgctacctctattcataacatagggggtaaattactggttaatgtggaagatcaacaaaaaacgagccaccaaaatgcaaccttagaaacaggtacattaacgattaatagtaataaagatctgacactatctggtgctaatgtgactgctgatagcgttacgggtaatgttggtggttcactcaatattgctagccaaaaagagagtgatcgccatgtcactgttggcgtcaatgttggctataaccacaccaatgatcctaaatcaagccaagtgaataaaacggctaaagccggagggtcattattagagaaaactatcaaagatacgattgattcaggaattaaatcatcaaccgatgctatctctgataaatacaattccctctcttcaactattgcagataaaacaggtatcagtgatgaaactaaagccaaaattgatcaaggttttggtaaagttggtaatggtattaagaatatcgtcacaggtgctgaaggtcatactgctaatgcagatatcaaagtcactcatgtagataatgatgctgtcactaaaaccacctccttaactagcaacaacgacctatcattaaatgtgaatggctcgacaaaactcaccggagcagaaattgcgagtaaacaaggccaagttgatttagggggaagtagcgttaaattagaaaatattgaaggacatcattatgaagccggcgctgatcttggtctgaaatcctctgtggtggatttagcaaaacaactggtaggtggagatatttcttttaaatcccccgttaaaacgaatgaaaccgtcaatacaaaagcatctatttctgaaaaatagtcgatacttcataaaagagtaactgcctattttttgtaagctaagcccacttgattgtcattattacaagtgggctttttattatcacacttatgacatctgctcccgataaacttacaattctttaatatttaaaataagccaaaaaaaataacccattgaatataaacaaaataaaagcaaacaaaataattatataatccttgaccttcccctaatggtaaagcttaagctttgtcccataccatatttaagagggaaagtttgatgaatacacctacaacattatcctcagcaaataggctgagcttacctgtagaaggtatgacatgtgcttcatgtgtcggacgtgttgaacgagcattaaaggcagtacctgaaataaaagatgctgccgtgaatcttgcaacagaacgtgctgatattacatttagcagtacccccaatcctgtacttgctgtaagcgcgattgaaagctctggctataaagttcctgaagagatcactgaattagctattgaagaaatgacctgcgcttcctgtgtcgggcgtgttgagaaagcattagctcaaattcctggtgtattagaagccaccgtgaatcttgccactgagcgtgctcatgtgcgtcatttatccggcgtagtatctattactgatttagaagtggcggttgtccatgccggttataaaccacggcggctatcagataatccagccaatactcgtgatttaagtgaagagcgtcgtgaaaaagaagcccgctcgttacgccgagcattacttattgccactatcttcacattaccagtgttcgttattgagatggctcacattttatccccggagtccatcattgggtaacgcaaacattagggcaacagctcaactggtatattcaatttgttcttgccaccatagtgatgtttggccctggcttacgctttttcaaaaaaggaatacccgcattattacgcggtgctcctgatatgaactcattagtatcagtcggtacagtagccgcttatgggtattctgtcgtttcaacctttataccccaagtcttacctgcaggtacggcaaatatctattttgaggctgctgtcgtgattgttaccttgatcttattagggcgaaatcttgaagcaaaagccaaaggaaatacctcacaagcgattaagcgtttagtgggtcttcaagccaaaacagcacgtgtttcacgtcatggtgaaatactagaaattccattagatcaagttatgatgggcgatatcgttgttgttcgtcctggtgaaaaaatccctgttgatggtgaggttgtagaaggccattcttatgttgatgaaagcatgataaccggtgaacccgttcctgtagcaaaagagataggggctgaggttgtcggtggcaccatcaataaaacaggcgcttttagttttaaagtgaccaaagtgggtgccaatacgatactcgcacaaattattcgcttagttgaggaagctcaaggttcaaaattaccaatccaagcgcttgttgataaagttaccatgtggtttgtacccgcagtaatgataggtgcaacgatcacattctttatttggctcgcatttggtcctgagcctgcactaacctttgcgctcatcaatgctgttgcggtactcattattgcttgtccgtgtgcaatgggattagcgacaccaacatcaattatggttggcacaggacgagctgctgaattaggaatacttttccgtaaaggtgaagctttgcaagccttacgtgatgttagtgtggtcgcactcgacaaaactggtacattgacaaaaggccgccctgagctaactgatctgatcccagcagaaaaatttgaatataacgagatattaagtcttgtcgcttcaattgaaacttattcagaacatcctattgcacaagcaattgttaatgcagcaaacgaggcaaaattaacgcttgctagtgtggataattttgaagctattcctggttttggtgttagtgcaacagttgatggaagatctgtctctgtgggtgccgaccgctttatgaaacagcttgggttagatgtcagtcagttcgcttcatccgctcaaaaattaggtgagcaaggtaaaacaccactgtataccgccattgatggccgtcttgctgcgattattgccgttgcagatccaataaaagaaacaacacctgaagctattaaagcattacatgcattaggtttgaaagtagcaatgatcacaggtgataacaaagcaacagcaaaagcaatagcaaaacaacttggtattgatgaaatagttgcagaagtccttcctgatggaaaagttgcagcattaaaacaacttagtcagaaaggagataaagttgcatttgtcggagatggtatcaatgatgccccagcgcttgcacaagctgatgtaggattggcaattggtacaggaactgacgttgccattgaagctgctgacgtagtactaatgtcaggtgatttacgcggtgttgttgatgcgattgcacttagccaagcaaccattcgtaatatcaaacaaaacttattctgggcatttgcttataacgcattattaatccctgtcgctgcgggcatgctttatcctatcaatggcatgttactttcgcctatattcgctgccgcagcaatggcgctttctagtgtatttgttttaggaaatgcactacgactaaaacgttttcaagcgcccatgaaaacacattaaacataaattatctttattgccagatccgaaaaagatctggctcatgctgataaagcaattatctctacttagaagaaaagcgctttattatcagataaggagaataagatgaatattggtcaagctgcaaaaaaatccggtatttcaagtaaaatgatccgatattatgagcaaattggtttaatacctaaggcaattcgtactgacggaggttatcgcgattacaatgatagcgatgtagattgttttcgctttatccgccattcacgtgctcttggtttttcaacagagcaaatatcaacattattagttttatggaataacagagaacggacaagtgctgatgtaaaagctattgccctttctcatatcgatgaattaaaccgtaaaatagcgcaattgcaacgaatgacgcaaacattatcgcatttagcacaagagtgccaaggtgataataatcctgattgcccaattattgctaagctagtcgaaccccaaacagggacagaacattaaacaacaaaaaaacaacctttattacctccactctcctattttatggttttttatccatgataaaaaaagcccacctttattcgaaggtgggctttctatttttaaaatggtgttacattcttacccatataataagcaataagtaattaacctaatttaccgtgacaatgcttatattttttacctgaaccacaagggcaaggttcgttacgacccacttttttgcctgatgccacttgaccatcaacggcagacatttgtgattcttttgtcacttcatggctaagttgttgctgtttagctaaacgctccgcctcttcacgacgacgacgctctaactcttcaacttcttcaggtaaacgaacttgtactttacttaatgtgctgatcacttcatatttcagtgattccaacatattagcgaacatagcaaaagattcacgtttgtactcttgttttggatctttttgtgcataaccacgtaaatggataccttgacgcagataatccatcgccgctaagtgctctttccacagtgaatccagtgtttgtaacatgacacctttttcaaagttacgcatcatttcagcactgacaatctcttcttttgctttatagacttcgattgatttttctaaaatacgttcgcgcagtgtttcttcgtgtagttcaggctctttatctaaccactctttgataggtaaatttaaatcaaagtcattttgcagacaggccgttaaaccttcaatatcccacatctcttctaatgattgaggtggaatatagttatcaatcatcgaagtaaacacatcttggcgaatactgtcgatagtttcactgacatcagcaacatctaacaactcattacgttgagtataaatagctcgacgctgatcattggctacatcatcatactcaagtaattgtttacgaatatcgaagttacggttttctactttacgttgtgcattagcaatcgctttagttacccatggatgctcaatagcttctgtttcgttcattcccagtttacgcatcatgcctgatactttatcagaggcaaaaatacgcattaaggagtcttccattgacagatagaaacgagaagaaccctcatccccttgacgccccgcacgaccacgtaactggttatcgatacgacgtgattcatggcgttcagtaccaataatatgtaaaccaccagaagctaataccgcatcatggcgtttttgccattgtgctttgatctcttcaatttgctcttctgttggattttccagcttcgcaacttcagtctgccaacttccccctaatacgatatcggtaccacgaccagccatattagttgcgatagtcaccgctgatggtaaccccgcattagcaatgatatctgcttccatagcatggaatttggcattcaggacattatgatgaatattcgcttttgtgagtgcttgggagatctcttcagatttttcaatcgagatggtccccaccagtaccggttgtccatttttagtacgttcacgaatatcttcaataatcgcggcaaatttacctttttcattcatataaactaaatcaggtaaatctttacgtaccattgggcggttagttggaataacgatagtttctaaacggtagatagagttaaattcaaaagcttcggtatctgcagtaccggtcatccccgctaatttctcatataaacggaaatagttctggaatgtaatggacgctaatgtttggttctcattttggatcttcacaccttcttttgcttctaccgcttggtgtagaccatccgaccaacgacggccttgcatggtacgaccggtatgttcgtcaacaatgataacttcgccatctttaacaatgtaatcaacatcttttgtaaataatgcatgggcacgtaaggctgccgttacatggtgcataagcatgatgttagcaggtgagtaaagtgactcgccctctttcatcatacctgcttcggctaatagcccttcaattttaactaagccacgctcagtaatattcacttgacgcgttttttcgtcgacagagtaatccccttctccttggaaggtatctgaatcttctttttcttgaggcactaaatgaggaataactttattcattttaatataaagttcagagctatcctcagcaggccctgaaataatcagtggagtacgagcttcatcaattaaaatcgagtcaacctcatccactaatgcatagtgtaatttacgttggacacgctcttcagggctaaacgccatattgtcacgcaaatagtcgaaaccaaattcgttatttgtaccgtaagtgatatctgcgttataagcttcacgttttgctggtggtgccatattagggaggttgataccaacacttaaccctaagaattcaaatagtgggcggttattttccgcatcccgttgcgccaaatagtcattgacggtaacaacgtgcacccctttacctgatagcgcatttaaataagcaggcagtgttgcagttaaggttttaccttcccctgtacgcatctctgcgatacagcgatcatttaataccataccgccaataagctgtacgtcaaagtgacgcataccaaaaacacgtttactcgcttcacgtacagtggcaaaagcttcaggtaaaatatcctcttctttttcacctttttttaaacgctcacgaaattcatctgttttggctttcaattcatcgtcggttaatttttcaaattctggctctagttgattgatttgagcaaccactttacgcatacgacgaatagcgcgttcattacgactaccaaaaattttggttacaattttacctaacataactctttattctcatttatggcgtaaatacgccgaatacagcctctatgtttatcgacgataaatcatagagataagcataatctaacaaagattaacaaactcaattaagctgttaggtaaggtccagcacggataccacggatctgagcaagccataatccggtatgataggaaatacgattttccgttaacacgccacgggaaatcggtaaattaactagggtagaagatggcgcttgagtcagtaacgcataaagcgtatcaagcatgacctcagcaacattcgcaacaggtgatggctcatcttttgcttttaccatcaattcaggtgaatgaatggtaaaagcaaaagagagctgcttaatcacatttttaacggcatgctgttgccagtaattaaaggtgaaggatgaagcaggattctgtacactctggcgtaagaataaattatcaaaagcgattaatgcttggctttgacgattttgtgaggaaggtgtatccgtttgtgatggattttcagcatgggcagacaccagcgaaggcataccaatacctgctgctaccatccctaatagcagatgcgaccaaaaatatcgtctgccaaattgtcgccaaaaatttataatgctcattaaccttcgttatttaattttataatttgtggagtcaaaatctatgcgggatagctacccacaatcattggaaaacatcctaaaagagcttgaaggttccaataaaagcacattacagcttatacaacagcgtgcaacaattttactcaaattaaatcgtaccgtcatggcacttttaccagcaccgttacaaggtaaatgccgtgtcgccaattatcgcaatgctattttaattattgaagtcacaaacgcaagttggatgacccgattacgttatgaaattccatcattactttctgcattaagaaaggaaattttaccatcgttatcctcaatagacatcaaaataaatccttctttaagcataaaagcgggaaaaaagagtgtcacttcatcattaaaagatccaacacccgtaaaaaaacgccatttaagtgtagagagtgcacaatcattgaaatatttggcagagaaaagcccgaagaaattaagagaaagattagaacggttggctgcacttgccggagagagtacaagtacagccaaagatgacgctaattagagataattaacgtgctttccaattgagcgattaagcaaaaactgtcgatggcgctttaaatgccactggcattttcgcttcgtcttcaaaggtgacgaattcccaagcagactcttttgctaaaacagcttggagcaatttattatttagtgcatgacctgatttaaacgcggtaaattcaccgataatgttatagccacacataaataaatcaccgattgcatctaacattttatgacgaacaaattcgtcttcaaaacgtaaaccatcatcgttgaggacacgatagtcatcaaccacgatagcgcaatcaaagctaccgcctaaacacaatcctttcgattgtaaatattcaatatcacgcataaatccaaatgtacgagcacgacttatttgactcataaaggattcagcagagaaatctaatttataacgctgagtacttgcatcgatagcaggatgattaaaatcgatagtaaaatctaatttaaaaccattataaggacgcatttccgcccatttatcgccatcttcaacacgtactgtttccttgatacggatgaattttttcgcagtgcgaagctcttcaatacctgcatcaagcaataagaaaacaaaaggtgctgcactgccatccataataggaatttcaggtgcatccacttcaattacgatattatcaatgcctaaaccagccagtgctgcatttaaatgctcaacggttgatatacgcacatcatcttcattcactaagcaagtacataacatagtgtcacgaactgattttgcgtctgctggaaaatccaccggtggatttaagtcagtacgacggtagatgaccccagtattagctggcgccggacgcattgtaagcgtaacttttttacccgtgtggagccccacaccagttgcttgtacaattcgttttaatgtccgttgtttgatcatcattttatctcgcaatattatccgtcctaccaattattatacttataattggcaggacagtttagcacaaaaagcggagatgccaatctttttgacgattaatcagcctgttttcttaagaaagcagggatatctaaataatctggctctttgttagcttgagtagattgttcattaaccgctttagctgcaggcttgctctcttctactgtagagaaagaggacatgctattttgcatttgctgataacgattttccatagcgttttgttgattttgcttattagttaccagcgtaatttctggacgtttatccatgccgatacctgtagcaaccacagtaacacgcagttcatcgttcatttcagggtcaagagaagtaccaatcaccactgtggcgttatctgatgcaaatgcacgaatggtgttaccgacggtttcaaactcatcaagacgtaaatcaaagcctgctgtaatattaactaacacaccacgtgcgccagacaggtcgatatcttccagtaatggacttgaaatcgccatttcagcggcttcttcagcacgatcttcgcctttagctgcaccagatcccatcatggcataacccatctctgacatcaccgttctcacgtcagcaaagtcgacgttcatcaaacctgggcgagtgatcagttctgcgataccttgaacagcaccttttaatacatcatttgccgcaccaaatgcgtcaagtaacgaaataccacggccgagtacttttagcagcttgtcatttggaatagtgattaatgagtcaacatgcttagataactcagtaattccctgctcagcaaatgccatacgctttttgccttcaaaattaaaaggcttagtcacaacagcaaccgttaaaatacctaactctttcgccacttcggcaacgactggcgcagcaccggtaccagtaccaccgcccatacccgcagcgataaataccatatccgcaccttctagtgcagcgcgtaacgcttcacgatcttcttcggcagcattacggcctacctcagggtttgcacctgcacctaagcctttcgtaatggcattaccgatttggatagtttgtccaactgctgttttacgtaatgcttgagcatcagtattgaccgcgaagaaatcaacgccttcaatacgttcacgaaccatgtgctcaaccgcattaccgccgccgccaccaacgccgatgactttgatcaccgcatcgttggttaattccataggttcaaacataatttctctccgttttgtgccttttagggtcgcttgctcaaacgacctctttttaaatttgtctgatgattaaaactctctttttaaccagccagtgagtttttttagccaaccactaactgcagagcgtttttcggtttcagtttcctcaccaaagtgagattctttaccgtaatgcaaaagcccgactgccgtagaatagaagggatcctgcgcataatctgttagcccggtaatatttaacggtttaccgatccgtacttgcgtgtggaaaacacgttgagcacattcaacaagtccatctatttgtgcagcaccacctgttaaaacaatacctgccgctaaatggtgctttattccttgctgacgtaattgttcctgaacactcaaaatctcttcattaacaagatttaaaagctcggtataacgcggttcaatcacctcagcaagtgtttgccgttgtagacttcttggtggtctacctccgacacttggaacttcgacattttcatctttgccaactaaagagcctaatgcacagccatgacgcacttttattgcttcggcatcatttggtggtgtaccaaaagcgtaagcaatatcgctagtcacaacgttgcctgcataaggaatgacacgagtatgtcttaatgcaccaccggtatatatggcgatatccatggttccgccacccatatcaacgacacaaacacctaattcgcgctcatcttctgttagcacagcaaaacttgaagccagtcctgcaaaaatcagttgatccacttttaaaccacagcgctcaactgcttttactatattcttcgccatatcgttatggcaggtaatcagatgtactttagcctgcatacgtacaccagataacccaacagggtttttgatcccttcttggtaatcaatggcgtactcttgcggtattacgtgtaaaacacggtgttcatcttttactttgacggatttcgcagtatgcaccacgctatcaacatcatcttgtgttacttcttcttctgaaattggcaccataccaatttcattttggcagctaatatgtttgcctgataacgccaaatatactgacgatatttggcaatctgccatcaattcagcctgatctacagcccgttgtacacattttacgacggattcgagatcgttcacgccacctttgtccataccccgagatgggcaacttcccaccccgataatattcactacgccatcaggcaggatctcaccgacaagggtggctactttggccgtaccaatctcaagaccaactactaattttctgtccgtcgctttgatcattattgttctgccttcgccttcatcgtgtcatctgccacgtcttgtttattcattcacatcaagtaataaaggagcccatccaactgcaccaccactgtcataacgtaaatcgacataatcaacccgtttgtcagtctgttgttgcaagataggatacagctcaataaagcgagcaatccgtttttcggtatccttacgccctaactccaatcggacatcattgtctaagactaattgccatccttgacgagctgacattgatgctgcttttaatttcagattactggcaagaagctgatctctcattgctaaataacctgctaataccattttctcacttccttgcggcccatataatagtgggtaatttccttgtgtttccaatcgcgttggcagactgaaaattcggccttctctatcaagaaaatgtgtgtcattccaacgggtaaatggcacatactccaccagatggatttttaattcgtctggccattgtttacgtacggtcacttgcctgatccatggcatacgttcaatttgttgctgaatgatattgacatcctgtgtcataaaagtgcctggttggcctaaagataaaatggcctgacgcacatcatcattcgttgtgtaatgccgctcaccagtaagtacaagctttgatatcggtagacgattagcatctttcatccaattcacaacttgtattccgccccaaataatggtggcaatcacacataagaagaagattaatcctgataaatagctaccattactcggtctatcagaatgacgtttctcttttatctctttattatttagcgctgcttgtgacatagtaaattcattcacccctgcgcaacattcaaataagagaatcggctattcttttgtacgatattcctacgattaatacttccactagatatatatactctataaatacctttagctttgataattaaatcactaaattgttcaatctgttgagaattatttaccttaaaagtcaaaatagcgagtttttctttaaatttcgctacttttaactgataaatttttcccacatctctttgagcaagcaaattaccgatcgtatttttcgcaaataagatctctttttgactaaaatctcccaccattacagtcattttcttaaccatttcaccataaatgatgttcacttgctcaaacatccgtcttaatcctcgcttaaagatggttgtaattttgtttctgctaagcgacgcgctattttaccaatatttccagcaccttgaactaaaacaagatcattatctgttaatacacccgctaatattgaggagatgttctcaacatcagaaacccaaatcggatctagtttgccacgttgacgaatagtacgacacagtgaacgactatctgcaccgggaataggcgcctctcctgctgcataaacatcggttaataataaaatatcaacttgattaagcaccgttgcaaaatcttcatataaatcacgagtacgtgtataacgatgtggttgaaataacatcactaaacgtttatcaggccaacctgctcgtgccgcttttatcgttgcatcaacttctgttgggtgatgtccatagtcatccaccagcatgacttccccttcttggccattcacatgctcaagactgaaatttcccaagaaatcgaaacgacgcccagtgccttggaaattaagtagtgcggctaaaatatgctcatccgcaatcccttcttctgtagcaacagccacagctgcggttgcatttaaggcgttatgacgtcccggcgcatttaataccacatctaaatcaggcatatcttcacgagaaatagtgaaaaatccttgcgcacctttttgttcgtaatgagtaatgcgtacatcagcatcttcactaaaaccataggtagtaatataacgccctactttaggaataattgaccgaataacatcgtcatcaatacacatcactgcgcgaccataaaacggtaagttgtgtaaaaaagtaataaaagtctcttttaaattatcaaaattaccgtgataagtgtccatatggtcagcttcaatattcgttaccaccgcaaccataggttgaagatgtaagaaagaagcatcactctcatccgcttctgcaattaaatagcggctacaacctaaacgagcatgggtaccggctgatttcactaaaccgccattaacaaaggttggatctaatcctgcttgtgcataaatgttcgaaatcatcgccgttgttgttgttttaccgtgggttcctgcaatcgcaaccccgtgacgataacgcattaactccgctaacatttctgcacgacgtatcacaggaatacgcgcttctcttgctgcaataatttctggattatctgcactaattgcggtagaaaccaccacaacactagcatcacgaatattttcagggcgatgattaaaatagattgtcgcccctaatgcaacgagttgttgtgtgactacgttaggtgctaaatcagaaccactgattgcatagccttcattagccaacacttcagcgatcccgcccatgccagcaccaccaatgccaacaaagtggatatgcctaacttttctcatctcaggcacaaaagatcttaatttcgccagctgttgtgtattcactatttacttcttcactctaagttaatggttacaagttacgtttattttttagccacttcgataattacattagcgactcgctcagtagcatccgtaatcgcaacactttgtgctttttctgccattagcattagctgatgtctatcccaattttctagggtgtcagctatcgcttctggcgttaaatcattctgttcaataatacgcgccgcaccggcattttctaatggcaatgcattccaatattgctgtctatctttatgttgaaaaggaacaaaaatagcgggtaaccccgcagcggcaatctcgctaactgttaatgcacctgaacgacatacaacaacatcagcccattgataagcttgcgctatatcatcaataaattcagtaactttatactcagatttaactgaatttttagaaagttcattttgatagcgtaatttggtatcactttcgctccctttgccggcctgatgccaaattgtaactcgctctcctaataatccagccaccactggcattgtatgatttaagatacgcgcaccttggctaccaccaataaccagcactcggacagcaccttctctgccttttaatctctctgctggggcttcaagtgctaagacatcgtcacgaaccggattaccaacaacaggcgcattagcaaacgcaccggggaatgcttgtaacacacgtttggctatttttgacaaccaacggttagttaagcctgcaataccattttgttcatgtaaaacaacgggaataccacagctccatgctgcaacaccgcctggtccagaaacatagcctcccatgcctaatacggcatcaggctgatagcgcttcataatccgacgggcttgaaaaatcgcttttataatacgaataggtgccgcaattaacgcttttacccctttacctcgcagacccgaaatacggatatactcgatttcaatgccatgcttaggcactaattgtgcttccattctatccgcggttcctaaccaacgaatatcccagccttgggattgcagataatgagcaactgctaatccaggaaagacgtgccctcctgttccgccggccatcaccattaatcggcgtttacgttcgctcatttaggactccttacaaacgcctgagcctgtgctaggcgtgattcataatcaattcgtaacaacatcacgatagccgttgacataataatcaaactcgaaccaccgtaactaataagaggtaacgttaacccttttgttggcaacataccggctgccgcaccaacgttgactaacgtctggaaggtaaaccagatcccaatcgaacaggctaaaaaacctgaaaaacgttgatcgagcagcaaagcacggcgtccaatttgcatcgcacgaaaagcgatgaagaataccattaaaagcactaaaaccacaccgatataaccaagttcttctgctaaaatggagaaaataaagtcagtatgagcttcaggtagatactccaacttttgtactgaatttcctaacccttgccccagtagatcaccgcgtccaaaagccatcaaggattgtgttaactgataaccactaccaaaaggatcttcccaaggttctaagaacgaagtgatacgtcgtacacggtaaggctcaacaataattaacatcacaacagcggcaatacctgtaccaataatggcgaggaattgccaaatttttgcaccggctaaaaaaagcaacgctaatgtggtcacaaacaacacgaccaccgtacctaagtcgggttgtaatagcagtaacacggctaatattaacatcacccccataggtttacagaatccccaaaaattgtttctcacttcttctacttttctcaccaaataactggagagataacaaaacagtgccaatttagaaagttctgccggctgaatacgtaaaggcccaaatgcaatccaacgtgatgcgccatttactgaactgcccactgccaataccacgagtaatagcaagatagaaccaaacagcattaagctactgtagcgttgccataccgccattggcactcgcattgttactaatgcaaggcaaagggcaacaatcatataaatgccgtcacgtttagcaaatagaaaaggatcttctgctaaacgttgtccaacaggcattgacgccgaggttaccatcacaaacccgacaaccgctaatccgaatgtaaaccagagcaaagtgcgatcataaggcacgaacgcgctgttatctgtttgataacttcccaccagccactgttttaatcttcgcattgcgtatacactcatcagccaagctcctgcgctaaacgggcaaactcatcaccacgttgttcgaaacttttaaactgatctagacttgcacaagcgggtgaaagtagcaccatatcgccagtttgcactgttggtgcaagtaatcgcatcgcctcttccatagtcgcggttaattgtgagacttgtggtcgtaaatttgccaatgcttgaccatcttgtccaaagcaatataagcgaatattatcgccactgagataaggtaatagcgcgctaaaatcagcagacttaccgtccccacctaacaacaggtgcaaagtcccttctacttcaagccctcttaaagctgcttctgtgctacctacattagtcgctttagaatcattgatccaacgtaccccattatgggagtaaactaattggaaacgatgagcaaggccatgataggtgtttaaaacagccagtgatgctttacgagaaattcccactgcatcagctaacgctaatgcggctaatgcattggtgtaattgtgttgaccagaaaggaacatctgtgaagtggcaagaagattttcaccatttacgttcaagtaacgattggtattatcaagctgataatccccttgtccgataccaaaactcacacaacgtgcatctttgccagctaaaggcaatgtcagaacatcatctgcgttatagacacaggttttagcattatcataaatacgtaatttagcttcacggtattgttctaatcctaacggatagcgattcatatgatcttcgctaatatttaataccgtagcagccgccgctgttaagctataggttgtctctaattgaaagctcgatagctctaagacatataagtcataaggctgtgttaataacgttaaagcaggtacaccaatattgccaccgacaccgacagggatcccgtcagctttagccatttcccccaccaacgtcgttacggtacttttgccattagagcctgttatcgcaacaataggtgcttttgcctcacggcaaaatagctcaatatcaccgacaatttccactccatgatctcgcgcttcaactaactcaggcgttgataacgcaatacccggacttgagacaattaaatcagcatcattaagccatacttgatgaaaactccccgtatgatactcaacatcagcaggtagcttatctaaacccgcgggatgctggcgagtatctatcactttaggtgttacaccttggcggataaaaaagtcaacgcaggatagaccagtaatgcctagtcccacgataacaacttttttcccctgataatttgccatgttaacgtacctttaatgtcgctaaaccaataaggactaacataagagagatgatccaaaagcggacaatcacacgaggctctggccaaccttttaattcatagtgatgatggattggcgccatacggaaaatacgttggccgcgcagtttaaatgaacctacttgtaaaataaccgagagcgtttcaacaacgaacacgccccccataatcactaataaaaattcttggcgtaataagacggcgatagtacctaatgcaccacctaatgctaaagagccaacatcacccataaagacttgggcaggataagtattaaaccaaaggaagcctaatcccgcaccgacaatggcggtacaaacaatcaccaattcgcctgcatgcattaaataaggaatttttaggtagctggcaaaattgacattacctgtagcccatgcaactaatgcaaatccagccgctacaaacaccgtaggcataatggctaagccatctaaaccatcggttaaatttaccgcgttactggtgccaacaatgacaaaataagccagtaagatatacaacatgccaagttgtggcatgacatctttaaagaaaggcacaacaagttgcgttgctggggtatctttaccaatcgcgtacatactaaatgcaaccgctaaagctaataccgattgccagaaatatttccaacgcgctattaagcctcgagtatctttacgcactactttgcgataatcatcgataaaaccgatgatgccataaccaatcagcaccaagagtacacaccatacataaggattatctaatcgcgcccacaataaggttgatacagcgatagaaaataggatcatgatcccacccatggtcggcgtaccacgtttgctaaagtgtgactcaggaccttcgttacgcaccacttgcccgatttgcattttttgtaaccatgcaattaaatggggtcccatccataacgcaataattaatgccgtcaataaaccaacaatcgctctgaatgtcagataagaaaacacattaaaaaatgtatgatatttaaccaaatattcggctagccaaactaacattcaaagcactcctttaatgcgttcacgatatcctccattgctgagcttcgtgaaccttttactaaaactgaaacaacatcatgctgctgtaataatggaattaattgggtaagcaaatcagctttaaatgaaaaatgctcaccgcctttattttcttgactaataaactggctgtaatgacccacggttaatacccgatcgataccgacttgatgggcaaaacgtcccacatcacggtgacatttttctgaatcttcgcctaattcagccatatctccagcgacaaagattttatatcctggtaattgagataaaacttgcagccctgctatcatcgacccatcattagcattataggtatcatctaacactatttttcctgttgttaattcaacaggatagagtctgccaggtacggctttcagtaccgctaaaccttgctgaatatccgttaatgtcgcccctaccgacaaggctaacgcacttgcggctaacgcattggcaatattatggcgaccaggtaaaggtagggtgattgctacccccccttctggcgtatgcaatgtaaaatcggtggtgagttgattaacaacgatattcgttgggtagaaatcggcttgagagtctgcagataaagagaaagaccactgagtttgacgtgagttaaaatgctgttgccataacgcaacatcattactttgctgattaataatggcagtgccttgctcttttaagccagtgaatatttcacctttagcttgagcaatcccttgtaaggaaccaaaaccttcaatatgtgcagaaaagagattattgaccaatgcactatctggtttaaccatattcacggtataggctatttcaccaatatggttagcaccaagttcaatcacggcaaaacgatgttcaggggttaaacgaaagagtgtcaggggaacaccaatatcattatttaaattgccatgtgtatataaggtttcaccacagtgacgcagtatcgaagccgtcatctctttaacggacgttttacccgaagagcccgttaacgccacaattttagcattgctaagcgaacggatataagcggcaatatgccccattgctaaacgggtatcttttacgatgatttgtggacattcaacatcgattttccgattaactaaaaccgcaacggcacccttttgtttgacatcagcaataaagtcatgagcatcaaaacgatcacctgctaaagcaataaacagacatgcatcatcaattttacggctatcggtagaaattgatttgatcattaattgattggcttggctttgagtaatagtactcaacgtgccttgagtgactagtgcaatagtttcgagagaaagcgctatcatgcgatcacccccaataaccgtgcaacagttaatcggtcagaataatcaagacggcgagtgccaacgatttgataatcttcgtgcccttttcctgccactaagatcatatcagcgggagaggcttgcattactacattagtcacggcttctgctcgaccttcaatcgctaatgcacgaccaggatccattaacccagaaaggatatcttgaataatggcttgaggctcttcactacgtggattgtcatcggtgataaccactttatcggcaaactgctctgctacagctcccattagtgggcgcttacctttatctctatcaccaccacaaccaaagatacaccacagtttgccagtacagtgtaagcgtgccgcttgtaacgctttttctaaggcatctggcgtgtgggcataatcaacgatcaccgtaggacgattatccgcactaaatacttccatacgaccacaaacgggcgttaatgcactggaagctttaatcactgcatcaagagggtattcaagtgccaaaagtgtagctaaagcacagagtaagttactgacattaaaagcccccattaatgggctttcaatttcaccttctccccaacttgaattaaaatggatagtggcacccgcatcatggtaattgatttgtgtcgcttgcacatagcgtccttgccaatttgccggcaatttatccgccatagtcaccgccactgcatcgggtagatgcgtcaaccatttatgccctaccgcatcatcagcattaatgattttttcgccactatggtgggtcgaaaataacaaccatttagcctgttcgtaattggccatatcaccatgataatcaaggtgatcgcgacttaagttggtaaatacgctggcgacaaaaggtagcgcactaacgcgcccttgaactaaaccgtgtgacgaaacctccattgcggtaaaggtagcgccttgattaactaattgctgtaattctaattggatatcaaccgctgaaccggttgtattcattgccggaacaatatgatctaataacccattgcctaccgttcccataacggcactgacttcacctaaaccttgcgcccactgtgctaacaattgtgttgttgtcgtttttccgttagtaccagtgacaccaatcagctttaatttattcgctggctgatgataaaaaattcctgcaagttttgataattgacaatttaggttttcaatataaataacgggtataccatgactttcacgaatttcgccatgagtagcaataccttcagcttccgctaaaacagcgcaaacaccttgtgcaattgcctgaggaatatagcgtctaccatccgtttcatggcctttaattgccacaaacagatcaccactcgcggcttttcggctatcgagtgtcatgtctttaagcgttaaagacggtgcttgtatcccgagtgcccctaataggtcacttaaattaggatctgccacttgtatcctcttttttattaatcactatttcacttttatcgtctggcgttaatgcatcaggctctacattcatcgtacgtagaaccgcgcccataattgtgccaaacactggtgcagaaactgcacccccataatatttgcccgcttttggctcgttaatgatcactactaaggcaaagcgtggacggcttgccggtgcaacaccggctgcataagaaatgtaggcattaatatactttccatctgggccgacttttttcgcggtcccggtcttaatcgcaacacgataccctttgatcgcagcacgaacgccaccaccgcccggtaaggcgacactttccatcatatgaaccactgttctcatgactttttcaggaaaaacgcgagtacccggtacaggagggtcaactttagtaatagaaagcggtcgataaataccaaaactaccgatagttgcatagacacgcgctaactgtaatggcgttaccattagcccatatccgaatgagaaggtggccctttcaagatcggaccaccgttgtttttttattggaaatatgccactactttcaccaactagccccaagttagttggttttccgaggccaaaacgggaataaacatctaccagttcagacgccggcatcgctaacgcaaggcgagatacccctacgttactcgatttctgtaaaattccagttatcgaaagctcacgataaagcgcaacatcttttatctgatgaccactaattcgataaggaacagtattaataacggtattttctttaataatattattgtttagcgcactcataaccaccatcggctttaccgtagagcctggctcaaaaatatcggtgatagctcgattacgcatcgcatctttcggcgttcccgctaaattattcgggttataggatgggctatttgccatcgctaacacttcgcctgtattgacatcaaccaaaaccgccgtacctgattcggctttattttcaatgactgcattggttaactctctatacacaacagattgtaaacgctcatcaatgcttaacattaagttgtgagcagcttggctatctgtttgagcgatattttcaatcacacggttaaagccatctttgcgtacaactcgctctccgggggcaccggtaagccattggttaaagcttttttcaaccccttcaataccatcaccatcaatgtttgtaacaccaatgatgtgagcggtcacttctcctgaaggataatagcgtttggactcttggcgcatgtttatccctttgattttcagcttacttatgtaatcactaatttcaggattaacttggcgcgcaagatagataaaacgagcggaaggtgttgcagaaattttttgagaaatttgattaacgggaagttttaatgcatcagcaagtgctaaccagcgtgaatcggtcatatcagggttagcttctaacacaactttaggatcagcccaaatagcatatacagggacactcaccgccaatggtcttcccatacgatcgcttatcatgccacgagctgtggggactttttgcacacgtaaagagcgcagatccccttcgcggatcaggggatctgggttaataatctgtaaataggcaactcgtattaataacgccgctaaagcaataccaataccaccgcaaagcaacgcaaaacgccaactcacaaatcctgttttttcttcaggtttacggagtttggcatttgactttgtctttgtcttcgcttttgccgaacgtgaaaatttcatacttgccttaattatttagtaaccacaatattctctttagttggatcaacatgaaccatgcctaactgttcacttgcaaaacgttcaactcggctatggtccgccaatgcattttcctcaaggatcaagttgcgccattcaatatccaatacatttttttctaacactaagcgctctttttctgctgtcagtaagcgtgttttatgtgctgtcgttaccacatagatcgcggagataataacggcgaaaaaaagaataagtggcaatttgccgtgacgcagtaaatcttgtcctatcactcccggtaatgaatggcgttcagtagacatttattcctcaatacgctgtgcgacacgtaaaacagaacttcgcgctcgtggattctcctcaacttcaacaccggtaggtttcattttatgaatactactcaggcgagcacttcctagtgctttaatttgttcttctgttaatgggatccccgctggaacaacaggccctttactttcatctcttataaagcgtttaactaatcggtcttctaaagagtggaaactaatcaccgataaacgtcctgctggcgctaaaatagacacggcgccttttaatgctttttcaatctcatctaactcactattgatatagatacggatcgcttgaaagctacgtgttgcagggtgcttatgtcgctcttttactggacttgcttcactaatcaaatccgctaactgtttagtacgtgttaatggctcttcagttttattacgcgccacaatggcacgggcaatgcgtttcgcgaaacgctcttcaccgaaggtttttagcacccaagtaatatcatcttcttcggcattcattaaccactgtgcagctgattgtcctgtggttgggtccatacgcatatcgagtggcccatcacgcataaaagagaatcctcgttcaggatcatctaattgcggtgaagaaacgcctaaatctaataatacgccatcaactttgccacttaaacctaactcattgatatagtgttcaatatttgaaaaaggcccatgaataatagagaatcgtggatcatcaatttcatttgccactgcgatagcttgtggatctctatcaatcgcaatgagacggccttgttcacctaattgcgataaaatcagacgagagtgcccgccacggccaaaagtaccgtcaatataaatacctgaaggtttaatattcaggccgtttactgcttcatccagtaatacactggtatggctaaaattattcgttgtcattatttaaagtgataaatccaatagtcgtgtcgataacggttcctgtgaggtttgctctgccaaaatgtcttctttgatctgttgataccagacctgttcatcccacaattcaaatttattgaattgaccgactaacatgacctctttggttagccccgcgtgctgtcttagcgtgctagctaacaaaagacgtcctgcgctatccatctggcattcactggcatgcccaagtaataaacgctgcactcttcgttcggcgggattcatggaagaaagcgctgccagttttaactcaattttttcccattcaggaagggtatacagcaataaacatggctgattgagatcaatggtacagaccatttgaccttcagaagcctcgttcagcgttgttcgataacgggaaggaactgttattcgccctttgctgtcgagattaacgagtgttgcaccacgaaacatcctcatttccctcagcgttataatttacaccacattatcccacaaatccccacaaatagagtttacggatggtatgaaaacgttgtcaagccagttgtaggacgctttattgatatttacagtaattttataatctcatcgaaatgaacaaattatcagcaggctaaaaaagcagaatattaacactatgattcctatcggttattttttatttttcttatttgttctcaaatagtgattatttatagagatgaaaaagggaaaaataagataaagaagtcataaaaagaaaatgacctatttaatgagataatgcctatttattgtcgttcatttacctttaaccaacataacaatacaaagccctctttaaattaaaaaaccggcttaatctactgaaaaaataatgtgatatcatgtagataattttttactgtcgagttttctttctgcaaagttaataaataaattattttatttaagtaatatcacttatagaaatatcaaaatttcacccgcgaattaaacaaaacaggataaattgtaaaaaaacgtttaagattaatctcaaattttattttatttaagtcacccgacattatttaaccaaataaactatccctgctttaatttaataaagcagggatagtcattataaaaaatgctgagtcagaaagtgaacgctaattaacgagtacgtcctaaactacctcggcgacataaatcacgtcgaatacgtgtaatacccgcttgtggtttttgctcttcttcaagacttgccaaaaccagctctaatacacgttgtgcaatatcacgatgtcgctgagccaccgataatactggacattcgaggaaatctaataattcatgatcaccaaatgtagcaatcactaactgcgtaggtaagcgtccacttctttgcaacgttacatccatcacaccttgtaatagcgcaaaggaggtcgtaaagagtgcatcaggcatcgggttattatttaaccattccgaaaatacctctgccgccgcttctcgttcataactattcgcataaagataagtcacttgtcgtggatcatcttgccacacactacgaaagccctgttcacgtaaaaaactgactgatagttcgggcaatgcgcctagatagagaaccgattgagaaggaaaagctttaagctcactcgctaacatttttgcgtcttctaaatcatcaccgacgacgctaataaaatgttcactctctaacgccctatctaaggcaatgataggcaacgaacgattagcccaacgctgataaaatgggtgctctgggggtaatgccgttgatacaataatggcatcaacttggcgttgtagtagatgttctacacaacgaatttcgttgtcaggttgatcttctgagcaggcaatcagcaattgataaccacgttgacgcgcttgtcgttcaagataattggcaattctggtataactggtattttccaaatcaggaataaccaaacctatagaacgcgtacgaccagcacgtaatcccgcggcaacagcgttcgggtggtaattgtgctctctgaccaccgccatcactttttcaacagtcttgtcacttacacggtactgtttagctttaccattaatgacataactcgctgttgttcgtgaaacaccagccaagcgggcgatttcatccagtttcactttagcctcttctaattattaatagggtatttattacattattgctatggttttcagtcatcatgctgatctgaatctgcattttaacacaatttactgataaaaccgtatgcgtcaacgtttccgtttataccttttaccaattacttgcattgttactgcctatgacttacctaaagtgcaataaaaaagcacctttacggtgcttttttgtctggtgatcacgactcttgatacatctgctcaatttcatttcgatagcgttcagaaattattttacgtcttaattttaaggtaggtgtcaattctccagactccatcgtaaacccttccgctaatagggtaaatcgtttaacttgatggaaactagcaaaattacgttgcatttcacgcaagcgttcatcaaataattctttgatcttagtatggcgtaataactctatccgatcgtgatattttaaatttaatgctcgagcatgttcttctaatgcatcaaaacaaggtacgatcagtgcagaaacaaatttacgggtatctgcaatcacagcgatatgctcaataaagcgatcttgccctaatgtaccttcaatcatttgcggtgcaatatattttccatttgaggttttcataagatctttcaaacgttcggtaatatataacatcccttcttcatctaatgcacccgcatcaccggtacgtaaccaaccatcttcagtaaacgcagcaactgtctcttcaggcttattaaaataacctttcatcacgatactaccgcgcacttggatctcgttttcttcgcctatacgtacctcaacccccggtaacggagtaccaatagagcctagtttataatggttctcttcccaacaagataccgtggcacaagtctctgtcatgccataaccatatttaatattaataccagcagctaagaaaaagccgatcaccgcatcatctaaacgagcgcctgcggcaggtaaaaaacgaactcgcccacctaaaatttgacgtagtggttgaagaacttttttatccgcaaagcgataacaccattgagatagcacgcctaatgaacgtccagctaagtgtgcctgacgttgtttttcaccctgtttaagagcccatttaaacatccattggcgtagtcgaggtgcttgagaaactttctcttgaatggcgctatatactttttcgtaaaagcgtggcactgcacacataaccgttggttttactgcagccattgcttcccttacggcatgggtatctgtgagataaacattaatagccccagtatgcataacatagaagctccatgcccgttcaaatacatgtgataacggtaaaaagcataatgaaacatctttatccgataatgaaaggcgctgatcatgcagataaagttgagaagccagattggtgtaatcaagcataacacctttaggctcacctgttgtacccgaggtataaatcagtgtaaacaaatcatctaaacaacattcatcaatacgttgttgtagcagagaatcatattgagattgacagtcactgattaagtttgtcagatgataagaaggtattgtcggatttaaaacgacctgagaattaaacacaataatatgtttaagttgcgggcataatagcgctaactcagaaacaacgtcatattccttttggtcaccaacaaaaagaatacgaatattcgcatcgttgatgatataagcggcttgttccacactacttgttgcataaagaggaactgtgacagcacgcaactgcaaagtagcaatatcggcaatagaccaatcaatgctgttttgggaaaaaatccccacattttcttgaacagccacgcccatatcgagtaatgcatttgagagtgcacgtgttttctttgctactgacgcccatgacatggcgatttcagacttagcatcccactgacgataagccgttttttccccagaagatgaaaattgcatctgcaatcttctaattatatgataatcatatagattattattatttatcatgattttcctgttatttatggaaaagcgtaggaataattaagttgaaataaagaataatgtcatcttctaatttcagcttacacctgttcgctgacttatctgaaagtctaagtgatccgcaaaaataaaggaatctaattttacataaatttgtaaaattgtgagtcatgaaaagttttgtcaatttcatcatactaatgaaaatgtaaaaatgagcctgaacactttgtgaacaaacaaagtattaacaagaaaaatataataaaatcaaaagataattataaaaatttattcatttacaagattaataacagagaaaataaagaaaaaaatcgattagatgacaatagttgcaactgatagggataggataacaattagggcaaaaatagtgacagctacccaagagacttatctttactatttactattaaagaatatcttttattggttattagcagtaagctaacgttatctgccactatttctgcataattagcatagagtgctaattatgagtgaatcactcttagttttgacaaacctcactaagtaaatttttcatccataaatggcctttatctcgcgccgttgactcatgccaaattaaatagcatggacgttctaccttctcccaaggtaatgatatcgccttaatgttcaattgttctgaatagctttcaactaaccatctaggcgcaatagcgaccgaataagtttttgagactagatttaatacactatttaaatcagtaccttcataagtaattaaatcttctaactctgtattcttataataagccgcactaaaagaccccacatcttctaaagaaacaatagaatgatgctcatttaataacatctcttcagtaacgctttctttaattcgtgggtgttggttagagacagccaaaaccacttcatcattgaataaagggtgtgaatgaaactctggtttatcaaattgtttataattaataaagaactcaacttcctgatattttaattggtgttcaatattactattcaaataagacttaatatttacattaatattaggggttttattttttattctctctacaatttttggcgctaacttgatatctaatggactgcaaatagataagctaaacacacgatcactttgttccggttcaaatcccgcccctggcaattcattatggactaattgtaatgcttgtcgaacagggccaaataattgtttggctcttaatgttggttgaatacctcggccataccgaacaaataactcgtcattaaacatgatcttaagacgagaaactgcattactgactgccggttgagacatacctaacacctgtgctgctcgtgtgacattttgcatttgcataacagcatcaaacaccgttaataaattaagatcaacattacgtaaatgcatatctgctgactctttattggtcgttgttgctgatgtgtaatccgtcattttttactccactatgttattataattggcgaattaaaacttattaataatataaaagcatattaataaattatatatctaaccatgactgtaacttttataaaaatattactacttattattcatcatccatgtacatcacaaaatgtataacacaaacaccaaaaaataattcatctttatattaaagagaataaattgacatttaaattacatattaatgaaatgattataccgatatatattacaacctgttttaccttatgccttgcaaataataaaacaaaatatgataaaaatcataataaaataataaaatctatcaccttacaggacactttcagaactattacagtcaccacggtaataatttttattcttatattcaaaatgttgctcaaatttattgatattgttgttaactacaaccgctcatccccctgatagttagttgttcaaaaaaaaagcaaacaattgtttaattttttatttcactccccgagagcgattatgtgaaacattaacctaatcaatgattgtttgatagatataatcattactaaaaatttagatattagtcagaattactaagaataaaatataattcacacatcaaaacaaattaaaaaattccaatgcttgacatgatgattggtatccggtatcaataaataaacattattaagaacaaatgtaaggatgtttcatgttaaacgcaattttactatcaagcctactactattcgcaacattgatgcgcggtcggctgatgggtaaaaaatgaaacatacctacccttagagaaaaacccgcgctaatcgcgggtttttttatacctgggagagcgcaaaaaacgaaataaaaaagtataaggaacagattatgagcaacaatgtgattatttttgacaccacattaagagatggcgaacaagcattgcaagctagcttaagcgtaaaagagaagttacaaattgcttatgccttagaacgtttaggtgtagatatcattgaagcgggttttcctgtctcttcccctggggattttgaatctgtacaaaccatcgctcgagaaattaaaaatagtcgcatttgtgcgttagctcgctgtgttgataatgatattgacgttgccgcagagtcattaaacattgccgaggcatttcgtattcatgtttttttagctacctccgctttgcatgctgaacataagttaaaaaaatcctttgatgacattattgaaatgggaacacgctcaattaaacgcgcccgacgctatactgatgatgttgagttttcttgcgaagatgcggggcgtacccatattgataatttatgtcgcattgtggaaagtgccatcaacgcgggcgcaacaaccattaatattccagacaccgtaggttataccacgccttatcaattcggtggcattatcactaatttatttgaacgtgtacctaatattgataaagcggtgatctccgttcattgccatgatgatttaggtatggctgttgcaaactctattaccgcagtacaagcaggtgcaagacaagttgaagggactatcaacggcttaggtgaacgagccggtaactgcgctttagaagaagtgattatggcgataaaagtacgtgaacaaatgatgaatgtacaaacgcgtattaatcacaaagagatctaccgtaccagccagttagtcagtcaattatgtaatacccctattcatgccaataaatccatcgttggctcaaatgcctttgcccactcctctggtattcaccaagatggcgtactgaaaaatcgtgaaacttacgaaattatgacacctgaatcaattggtttaaaagaggtgcaattgaacttaacgtctcgctctggtcgagctgcggtaaaacaccgtatggaagagatgggctatcgcgaaacagattataacttagattctttatatgctgctttcttacgtttagctgataaaaaaggtcaagtttttgactatgacttagaagcattggcttttatggggcaacaacaacaagagcctgatgagtttgtaatgaactattttaatactcaatccggctcctcaacagttgccacggccagtgtcagcattagtcgtaaaaatgaagaaatcactgaagcagcaacaggaaatggtcccgttgatgctgtctatcaagctatttctcgtgctacaggttatcccttaaaactggtgacttatcaattaacagccaaaggtgaaggacgagatgcattaggacaagttgatatcgtagttgaataccaaggacgtaaatttcatggcatgggattagaaactgatatcgtcggttcatccgccaacgccatgatgcatgttatcaacagtatttggcgttcagagcaagtcgaaatagaaaaacgcaaacaccatacaacacaagaagcggtttaatcattatgtctaaacattatcatattgcagtattgcccggagatggcattggccctgaagttatggcgcaagcacaaaaagtgatcgatgcggtaaataaacgattttcactgaatatcacgaccaaagagtacgatattggtggtattgctatcgataatcatggcacaccattaccggcaaccaccttagctggatgtgagcaagctgatgcgattttattcggctctgtgggggggcctaaatgggagcatttaccggcagatcaacaaccggaacgtggcgcattattacctttacgtaaacactttaaattattctgcaatctgcgcccagctcgtttatataaaggtttagaagcttattgtccattgcgtgctgatattgcacaacgcggttttgatattttatgtgttcgtgaattaactggggggatctatttcggtcaacctaaaggccgtgatggtgaaggtcgcgaagagcgtgcttttgataccgaggtttaccatcgctatgaaatcgaacgtattgctcattttgctttcaaatcagcgcaaaaacgtcgttataaagtcacgtcgattgataaagccaacgttttacaaagctctattttatggcgtgaagtcgtcactgaggtcgctaagcaataccctgatgtgaccttgcaacatatgtatatcgataatgcgacaatgcaattaattaaagatccagcgcaatttgatgtattgctgtgctccaatatctttggcgatattttatcagacgaatgcgccatgatcaccggttcaatgggcatgttgccctctgcaagcgtaaatgaagcacattttggtttatatgaacccgcaggtggctccgcaccagatattgccggtaaaaatatcgccaatccaatagcacaaattttatcaaccgccctattactgcgttatagctttaatgaagataaagcagcccaagccattgaagaagcaattacaagagtactagcaacaggctatcgcaccgcagatttagcgggagaaggaaacgcaataacaaccgcagaaatgggtgatcatatcgctcagtttattcaagaaggggcataacatgggtaaaacattatatcaaaaaatttacgatgcacatgttgtcagagaagtagcgaatgaaacacctattatatatatcgatagacatttagtgcatgaagtgacttcacctcaagcttttgatggtttaagaaccaaaggtcgtgctgttcgtcaacccaacaaaacctttgccacaatggatcacaacgtttcaactcaaaccaaagatatcaacgcctgtggtgatatggcgcgtattcaaatgcaagagttaatgaaaaactgtcaagaatttggtgtgaccttgtatgacttaaatcacccatatcaaggaattgttcatgttatggggcctgaacaaggcttaactttaccaggcatgacaattgtttgtggcgactcacatacagcaacacatggtgcctttggcgcattagctttcggtattggcacttctgaggttgagcacgtattagcgacacaaaccttaaaacaatcacgtgctaaaaccttaaaaatcgaagtacaaggcaaaacagccaatggcatcacggcaaaagatatcgtattggcgattatcggaaaattgggtagtgcgggaggtacggggtatatcattgaatttacgggagaagctattgaagctttgagtatggaagggcgaatgacgttatgcaatatggcgatagagatgggggcaaaagcaggcttagttgctcctgatgagactacatttgcttacttaaaaggacgtcaatttgcccctcaagccccattgtgggatgaagctgtcgcctattggaaaacgttaaagtcggacgaagatgctatttttgatgctactgtaacgattaatgccgcagagattgcaccacaagtgacttgggggacgaatccgggacaagtgattgctattgaccaaattgttccgcgattgaacagttttaacgatcctgttgaacgagctagcgccgaaaaagccttagcttatatgggattaactgaaggtgttaacttaactgatattacaatagataaagtttttataggctcttgcactaactctcgtattgaagatttacgcgcagccgcaaagatagctaaagggcataaagtcgcctcccatgtacaggcaattgttgttcccggctcaggccctgttaaagcccaagcagaagcagaaggtttagataaaatttttattgaagccggttttgagtggcgtttacccggctgctcaatgtgcttggcaatgaacaatgaccgattaaatcccggagagcgttgcgcatcgaccagcaatcgtaattttgaaggtcgccaaggtcgtggtggcagaactcatttagtcagtccggcaatggccgctgccgccgccattcatggacattttgctgatattcgcacttttgcaacagtatcataacggagagcctaatgaataaattcacacaacacactggaattccagtacctttagatgctgccaacgtggatactgatgcgattattcccaaacaatttttacaaaaagtcactcgcacaggatttggtaaacacttatttcatgattggcgatttttagatgatgaaggcacccagcctaacccatcatttattttaaatcagcccatctatcaagatgcttctattttattggcgcgcgagaattttggttgtggatcttctcgcgaacatgcgccttgggcgctcacagattatggctttcatgcggtgatcgcgccgagttttgctgatattttttacggcaattcctttaataaccagttattgccaatcaaattaagtgatgagcaagttacccagttatttaattgggtaacagagcatgctggtacgcctattaccgttgatttagttgcccaacaagtgatcgctggtgaattatgcttctcatttgaaatcgatgcatttcgccgtcattgcatgattgagggattagacagtatcggattaacgttacaacaccaagcagagataagtgcttatgaagctaaacaaccagcttttatgcgttaatcactgactcaattaccttatttcactgtttgttatctgtaaaaatttaaactttgtcattctcgccgctatttacctcgcggcattttttttcagtaaaacgaacaaaaaagccagtgaactattatcactggccggtaatcaccgcatgctcaaagggggagtctgttagtattcataatttgtgataactaacataagagctaactttaaacacaaacattatcggtctaatataaggaaattaaaattgatcactttaataagggatttcctcttttatgacatcaccccgcttagagttgcaatttattcgcttatggcaagcttttgagggaaaagagactgaaaccacattacaagagcttgctgaaacattacattgcactcgtcgccatgtgcgttcgttactaaacaaaatgcatcaaactggttggatagattggcaagcagaagtaggaagaggaaaaaaatccaccctgacttttcattctaacgcctttgacatccaacaaagccgagcagagcgattactggaagaaaatgatatagaaaagctcgttgcactgatgggcgataaagactcgttacggcaaatggtgctttcacagattgaaaaaagctttcaccctagccaacaacgtctacgaataatttactatcgcccttttcgtaatttattacccggtacgccgcttcggcgctctgaattacatttaatgagccaaatatttaattcattacttcacttaaaagaggaaaatggggaagtcgaagcggaattagcccatcactggcagatgatcagcgagcaacattggcgcttttatttacgccctgctatctattttcaccatggacgagaattaaccatagaggatatcagcacctctttaatgagaatgaaagtctgcaatccactttatgcacatattgagaaaataacctcaccgcaaccttatgttattgatatttatttaaccgtaccggataaacaatttgccaccctattaggtagcccacaagcagcgatcttaccccaagaatggcgaactctcgctaatttttctcagcaccccattggcacaggggcataccaagtgatgagcaatgatcaacataaactgcaaatcaaagcgtttgatcgctattttggtttacgcgcactattagataacatcgatatttgggtggttcctgaattaaaagacaaaatggtttgctctacccttcatttaaccgatgatgatactcataacaactcactggaaagccgcaaagaggaaggctgttattttttactttacgatagccgctcaacacaatgccaacaacctgagatccgcgaatggcttagtagtgtattaacaccggtgaatatgttggcccattgtgcgccctcttatcaacgccattggtcacctgcttatggtttattgttacactggcaccatagcaaactgatcccaccgcatactaaacccgcttcactcacaaaactgaccattacactgtataaagagcaccacgaatacagcactattgctgaactgatcaaaaaaatcttatctgactatgatatcgaattatctattcaagtgcttgattatgaacagtggtattatggtgatgcaaagagtgatatctggttagctaccgtcaatttctataaaccgctcgagttttctatttttgcagcactttatgaactgcccctatttcaccagtgcatgggtgaacgttatgaagatgccctagccttatggcgtcaaaaagtattaccgcttgaagagtggtgtcgccaattaacacaaaataattggcttttcccgttatttcaccatttacttgaattacaagggcaacgtacgatacgcggtgtaaaaatgaatacctttggttggtttgattttaaatcggcatggtttatacctgatttagaaacgcccccattaaaatagcgttttcacttataactatgttaattcacagaaacccgcaaagttataaacaccaacagtaaggtctaggggatttattcactttttctgtggatatctatgtgaaaaagagtgagataatcagggtatagtttttatattagcctacagactgttgaaacattttttaaaatatcacttataattcaaattagtagataagtttttatccctatttcaacgattggataaaccaatgaataaagtccaatggttaaattgtacaaaaaacaatcatagtcggttttatccacaggttgtgccgattagttaatcgaaataggcagattttggggaatatcggcaaaagtcaaggctgtaaatcagaacagtgatctcacttttgcggagttatcccacaaagctgtggataacctagtgcaaaagcctgtttatgatctaaggataaccctgaacaacttatatcatttattattaaaacctcgattcacataaaaaaatgatgatatatcatgctattatgttttaacttaaatcagtgaaaaaacattttccatcatcctttttttctgtttatttattgtacaggaagacagttatttatgtttacgccaccagcagcacctgaaaatgaatccgttttactcgcacgagcacaagcgctggctggttataccttcggtgaactcgccgcttttgcacagcttcctattcctgaaaatttaaagcgtgataaaggttgggtcggtatgctattggaatactatttaggtgccagtgccggcagtaaacctgaacaagatttttctcatatcggtgttgagctaaaaaccatccctatcgaccgttttggtatgccattagaaacgacctttgtttgtgtagccgcacttacaggaaacagtgggatcacatgggagaatagccatgtaaaacgtaagctgtcgaaagtattatgggtacctgtagagggagaacgggagatcccattagcacagcgtagagtcgcttccccgctactttggagccccaatcatcttgaagaagagctactgcgtcacgattgggaagagttaatggatatgattgtcttaggaaaagtagaaagcattactgcgcgtcacggacaagtattacaaattcgccctaaggctgctaacagtaaggcattaaccgaagccattggtgaaaatggacaacgcatcatgacacttccccgtggtttttatttaaaaaagaactttacagcgccactgattgctcgttatttccaactttaatgcgttacagtaaacaaaatgccccgagttatcttagtgaataactcggggcacatcgtattttttgctggtaaattattaaacacagtgagttgatgctaatcgaacgcctactgctctggtgatttctgtcaatgttgtcagtgttggattaccattttcagataatgctcgataaatatgttgtcgagataatcctgattttttcgcaatcacgcccactccaccatgagcctcaataatttgccgtaatgcaattaaaaatgcacctattcccccaggctcataaataccttctaacgccgtttgcaaatacacctcagcataatcaggatcttctcgtagttcatttatcatctctaaatcatggtcaagatatgcaggaacagtttttctttttactacatctattttattggtcatttttcatccttacatgataatcttcaagatagttcactgctttatcaatatctgcttgttgagtacttttattccctccaacaagtaaaagaataataaattcattttctattgaataataaacccgatatccctgcccgaagtttattcgtaaagcccagactccatcacgaacaaatttatgatcggcgaagttaccataacatgctcgagttacttgtacttcaattttagcagccgcttgaggatctcgtttcctaagcttttgtatccactctcgatagggtactttttggtttctgtcctgataacgcactattttatatggcatttgctttccttattgccaaagtcctaattgttgcttataaatcacactaaaaatgtaacttataacagacaaaaatcaaagaggaaatatttttcgtacacatatcataaaaaaatgccccgagttatcttagtgaataactcggggcacaaataacaattatgattaagtaatcaataattaacgatagacaataccgccatcggttaagatagcttggcccgtaatatagtcggaatcatcacttgccaagaaggaaactaacgcagctacgtcatcaggagtttgagcacgtcctagagcaataccgtccacatattttttataggtctcaccttttggtgctccagtaatttcagcgaaacgctcgtcaatctcaacccacatatcggtgccgacaatgcccgggcaataagcattaacagtgatgcctgcgctcgcatactctttagctgccgcttgtgttaatgcacgtactgcaaatttagtggcagaataaacccctaacatggcaaaaccatcgtgcccagcaatagaagatgcattaataatcttccctttatggcctaatgctttaaatttctcagaagcggcctgaataccccacatcacaccattaacgttaattttgaagatccgatccatatcttccggagtcacatctgcaagaggtttcacctgtgcaatacctgcgttattgatcataacatcaaaaccgcctaaggttttttcagcatgttcaactgccgcaaagacttcatcacggttgctaatatctgcagcaaaggtcgttactttacgccctaacgcttcaatttcttttgctacatcggataatttatctgcttttaagtcaaccagagcaatatcggcaccctctttagcaagacgtaatgcgataccacgaccaattccctgagcagcacctgtaactaaaattactttaccattcaaagccattgtctttctcctgaatatttacagatgaaaaagctcttccaaaaaagaactttattaataatttaacagtagcaattaaagtgcgatgtgacaaagaaatgatcattcactagtaaacacaataagtagaatagaatatagtgaaaataattatcatttagaataacaagttaccaaaaggccatcatctgttgcaaaagagcagatgatcttttttactcattaactttatagttagcaaaaaatgcttaactcattcatttaatggataaaaataaggcaatatctaaatagatattgccttgacattatttatgacaaaaaagtaattattttttagccgcttgcagatatagcatatcaagtgcaatggttgctccggcaagggcagtaatatctgattgatcatacgctggcgatacttcaactaaatccatgcctacaatatttaacggctgtagagcacgcagcattttcagcgccttatccgtggttaatccacccacaaccggtgttcctgtacccggtgcaaatgcgggatcaaggcaatcaatatcaaaagtcaaataaacaggaagtgaacccacaatctctttaatttgcgcgactaaatcatcaaccccacgatcattaacttgtgcagcatccaagacagtaaagccgttattagtgtcatgctcggtacgaataccaatttgcactgaatgctgtggatcaatcaaaccttcattaggagcatgatagaacatcgtaccgtgatcaaacttactgccattagcataagtatcggtatgagcatcaaaatgcaccaaagccattttgccaaagtgtttagcgtgagcacgtaatagaggtaatgtcacaaagtgatcaccaccaaaggttaaacatcttttacctgctgctagcaatttttccgtatgagcttgtagcttatcactcatatcttgcgcatcaccgaagttaaatactaaatcaccacaatcaacaactttgaggcgttcacgcatatcgaagtgccaaggccagcgatgtccttcccacgctaagttagtcgaaatctggcgaatagcgccgggcccatggcgagtacctgcacgacctgaagttgccatatcaaaaggcaccccagtgatcacccaatcagcatcactgctataaggttgaaaattcagtggaaaacgtaaaaaaccaaatgcatttgagatcaaagaattatcagtctcattacctaacgtacaatttttcatgccattacctctgttacttattttaacaagcaacatataaatcaatatgatagataaagagtgatgtatcaacaccactctgcattaggaagtaagcattactcctcttcttccagataggtataaccgtataagccactttcaaattcagttaggaactgctcttggagtgctttatctaactgtgcatttttcacttgagtacggaagcgctccaacaataccgcaggattaagttttacatattgaagcatatccgcaacggtatcaccctcttcactcaactgataagtaagattgcctttctcatcaagataaacatcaacagcagctgtatcaccaaataagttatgcatatttccaaggatttcctgatacgcccccaccataaagaagccaatcattggtggatattcaggatcataagctggcattggcatcgtggtttcgaccccatcaccatcgacataatgatcgataataccatctgaatcacaagtgatatctagcaatacagcacggcgatcgagcggtttatctaaaccttcaattggtaatacagggaataattgatcaattccccaagcatcaggcaatgactggaacagtgaaaagttgacatagaacttatctgacatacgctcttgcagttcatcaataatcgggcgatgggctcgattacttggatctaaatcatattgaatatgacgacagatattcagatataactcttccgcccatgcacgctctgtcagacttaacataccgtgtacatattgagtatggacatcatgtaaatctaattggctatcatgcagccattcacgcaatgaacggctattccctttggtttgcatctcttcccatgtttcccaaaggcttgcgataggtcttggagcatcttcggccggcggcgtgattgcagtaaattcgttacgttcaacaccaataacattggaaataagcaccgtatgatgcgcagttaatgctcgacctgattctgtaataacggttggatgaggtaattcattttcatcacaagcatcaccaatcgcccaaataacgttattagcgtattcattcaggccatagttaacggagcaatcagattgtgagcgcgtaccttcataatcaacgcccaagccaccaccaacatcaaaatactgaatattgacccctaacttatgtagctcaacataaaaacgggctgattcacgcacacctgtcgcaatatcacggatattagccatctgtgatccaaggtgaaaatgcaataactgcaaactatctaaacgaccagcttggcgtagcgtatcaatcagttgtagtacttgtgttgcagcaaggccgaattttgatttttcacccccactggcttgccatttaccggagccttgagaagcaaggcgagcacgaacccctaagcgggggatcacttctaaacgttcggcttcttcaagtaccatttttatctcagacattttttcaatgaccaagaacactttatgaccgagcttttcccctgtaagggctaaacgaatatattcgcgatctttgtaaccattacaaacaatcaccgaactggtcatgttggcatgagcaagcactgccattaattcagctttagagccagcttctaatcctaatggctctccagcattaattagcgattcaatcacacgacgctgttgattgactttaattggataaactaaaaagtaatcccctttgtagccataagactcacgtgcacgatgaaaagcggcattaattgagcgcaaacggtgctgtaaaatttgtggaaaacaaaacagcgcaggaaggcgtaaatgtgaatgctcttcttgtacttgcttaactaattctgttaaatccagcgttgcttcaggcacatcaggatttgggcaaacactaatattgccgcgattattcgcgcagtagtatcctcccccccaatatgtgatgttataagtctgttgcatcttacgagcgatgttatcattcatgacattctccttagggagtatgagtttataccttgcctgtcactatagtagtcaataatttcatggctagctgaaatgaccgataaataacagttagaagtaatgactcactatatatttttgtatgattatccagcctaacgcaggatatagtagtagaaagcgatgaagttaaccgactaatagttaacacaatcacctattggcaagtaacagacaacttcgctctaaagaaaaagagctcaaagaggaaatcactctagacatactacgggtatagtattggcgagtactgttttggtttttgaaaagaataaccagtagacaatggatcattacccattcactccacacatggcttaaccttataagccatttccctaacagagaaacaggatcagcaatcctgcggtttacactgtgattcagttttcacagtaacggcgaggttatacctgtagttgaatcaaaatgcaaaaacaaaatagataaatcgcttttttttattatttttctttttgctcacttgaaaaattgtgtcacacaaaaaatgatatcaactattggatgcgagtttatccctatatttgattaaaaaaagctggaattaaagagaaaacagtcctaaaatggacgtctagatgttaaaacatccatccttagaccatctgtattaaggtaacgagatataatgactacacacctttttacttctgaatcagtatcagaaggtcatccagacaaaattgcggatcaaatttctgatgccgtattggatgcaattttagaacaagatccaaaagcacgtgttgcctgtgaaacttacgttaaaacaggcatggtgatggtaggcggagaaattaccaccaaagcttgggttgatatcgaagagatcacacgtaaaacagtacgtgaaatcggttataccagttcagatatgggctttgatgctaattcctgcgccgttatcagtgcgattggtaaacaatccccagatatcaaccaaggtgttgaccgcgcagatccccttgaacaaggtgccggtgaccaaggcttaatgtttggttatgccactaatgaaactgacgttctgatgccagcgcctattacttatgctcaccgcttagtccagcgccaagctcaagtacgtaaaaatggcacactaccatggttacgtccagatgctaaaagccagatcactttccaatacgacaataacaacattgttggtattgatgccgtggttttatcaactcagcatgctgaagatatttcacaaaaagacttacatgaagcggtaatggaagagatcattaaacctattctgccaacagaatggttaaatgaacaaaccaaatatttcattaacccaacaggtcgttttgttatcggtggcccaatgggcgactgtggattaacaggtcgtaagatcattgttgatacttatggtggtatggcacgccacggcggtggggcattctctggtaaagatccttccaaagttgaccgttctgcggcttatgctgcacgttatgttgcaaaaaatattgttgctgcgggcttagcagatcgctgtgaaattcaagtgtcttacgctatcggtgttgcagagccaacatctattatggtcgaaacatttggcactgaaaaaatccctacttcacaactgatcttattagtacgtgaattctttgatttacgcccttatggcttaattcaaatgctggatttactgcatccgatctaccaaaaaacagcagcatacggtcattttggtcgtgctgaattcccttgggaagcaacagataaagctgagattttacgtgaagctgcgggtttaaaataaatttcccttgtttcatagcaaactcattaaaccacatcttttaggtgtggtttttttattcctgaaatttatctgtttgttaaccataaaaaaaccccgcaatattaacggggaactcaaagtcagtaagagaacagggagtgatgatgaaataaacaaatcaatcagggtagtctatccactctccttcatttaatttgatataagatttcccttgataatcaaccacaatggtattttgattttctgataccgtcgcggtttgtggtaattcacgggttaaagcattccaatcaatggtgggttgattaaagatatcgccattcacattacggagaataaaatcggataacgctaaataactgcttggtttatctatcatcataggcgtatgaggtaaacgttgatttttaagtccagtaaaacgaataccgacaggaactgtagtaatactttggcttggaatatctcgcaaaccagacatctgagttatatcaccttgtaatgcggctccatgttcaggaacaatcactaccatcacttttctgccacgtttatcaagggtattaataaaagcatttaagttatcaagtagtgctgaggctcttttgccataatcagccgttgtattttcgccaacgaacctattaccatcatgaagtgacactaaattgacaaaggtcaccgtccgtttttcatctgatttttctcgtgcttttaaccaacgctctaaggtctctttatcgttatagattttagagccatcaaaagcggtaatttgatgagagagtccgctttgatcttgcaacggcacattaagattacctaactctctaatttcttgaagataatgaccaaactcgccattatgatcgagcaccaatttcttctcaaaacctaaagcagccagattatccatcaataagcattgcatatcgacaggatcatacaaatcagcgtgttgtgtttgcccacaactggctcttaataaacgtaatgaagcggggccactataagaagcaacactattaaagcgattaaataacacatcaaagttaccccaaataggatgttgctgtaatccgacggctgccgcatcagcggtagagagtgaacaaatattaataattaaaatatcaaagggttgtgcataagaagagagctgagcgggagcgggtgtgctgcgtttattttcgtaacgataaaactgagcaagccattcatctaacactttgttattagccggctgtttttgtggcgggtaaggtgaactcagtacgttattatttggcgctctagtctgcgctgtcgataatatttctgtattttgcggttgtggctgatcgatagatgtgttggtttgctgagtaaagctattggcagaaacagcagaagccatagcgcctgaaaaatgggtaaaaccactaatattaagccacactacacccgcgataataaacaccgacactcttacccactgttcaataaagagataccctaccagtaaaataaatgccaccccgatcatctttaagttaataaaattaacagctaattcaatgaggtaagagaatgaaaaattttttaactgccctccttgttctaataccgttgaaaaactaggtagccaagtgtcgtggtagaaaagcataacccctatagggatcgctatccaattacgtaatttatgccaaaattttttcggtaatggaaataataaaaatgctagaaagagtaaattgctaaatgcatcaaattttaaataaccataccaaagcaaaacaaactttagcaaaaaataaaaattccaggcgcccaacccatgccagtaatgtaaaaaactgaaccgagttgttttagtcttgttcattttaattacctacttattcgtatctatataatatccgacattgatatgaatattcatatttgcctttttatacttcttatttttataaataactataaagttaactcttaatagaatattcccccatcaattagtaaaactacttacatgtaaaagaaaaagtacataaaataaattactgacaaataaatataagcaatcaacttaaaaataattaagttgattaataaacaaaacgccactttatatttatataatagacataaattttatagttgtgttgttattttaaaaaataaatagcaacacagagttatcttattttcttatatccaaaaccaaacaaaataatcacaaatagaacggttaaattaacaaatgcattacaaaacaaacactataagaacataaagctaaaaaacaaaataaaaacaataacaaacagatgatttaactaatttaatggtattttacttgataaaaatcaaatcttttttgatcatctaaaaaagactatcttagaatttgttataaataggtaatttacaattatcttatatttcgttttttttgactaataatggtttatttattatttaaatgaatttattgagaatattatcattgtcaaagagggttattatttattcccaatagaatttaaattcgtatatttaatttatgtatttatacgtaattgaaataactatttttaaggcatatccttaaataaagaatattaatattttatttaacacttaccccttctttgactaagaaaaataaaattacaggttaagaatttatttttacatgagggttaaaaaatggaaaataaaaaaattattcgctcggagataaaaagagaaaaagagagtacaaaccaagatataaataaattaaagaaattattttcaataaacaactatcactatagagatattaataacgaagaaaatcaacatagccttatttatcgttggccattactcaacacatttaattcaataactaaatgagaaaaactatgccactaattgtattaaaagggctcagaggtggagtaggaaccacctcaataaccgttgcactggctcgccaatttcatcaccataaatacaatgtcattgttatcgataactgtgtgaataatatcttacatttctattttccagaaaaatcacaagtcaccacattaggacaagcactactcgcgcataccccaatagaacaagcgatttgtgattatcaaaacggttatcaaattttaccttttggagtcgttaattcagaagataaattgcacttgcaagcatctgccactgccaaccaacatctactgcatttttttaccgcttttactcaacaatacccagacactttaatttttctcgatttacaaccagagcacgataccctttttaaatcatgggttgcgaaagccaatatcgtattaaccgttaccacacctgaaagtaactgtcatattcggcttaaccaacatacctttgctgccaatgagtatattctggtgaatcaattttgtgccactagccaaatccatcaagatttttatcaattttggcaaaccagtcagtttcctttctgcccaataaaacttcatcgcgatgaagcattattagaagcctgtgcttcacgcttacctttatatgattaccgcgctaattgcatgttagttgaagaaattaatcaacttctacaatggtgcttgcctttattgttaagcaaaaaaggatagccacaatgtcaaccatcgattatccagagaaaaaagcgtcccgctcgataaggcaacaggctactgtgcagccgcatatcttaacccgttattacaaattttatcgtcataatggggcttcattcagtgcggctatcgtgaatgagcttttctgggtattaatgtggctctttttgcgtatggaatcccctttttggcagaaaatagcacaaaaacaacaacaactatttcctcatattaatccgcgtcgccctaaattatgcgatccgatccgatacttattacaaagtatttggcttatttgccattatttgatgctcaccttggtgaaaaaaccgattcaatttattgtctatattagacagtattatcaaaatctctttgctcgcttatctcctgttgcgcgagatatgatccatcataagaaaaaaaacacgccactatggcaatacgctctattatcgctcgttgctgtttttgccatttttattatcttattaagtattactcaaccttttgatttaaaactacaatttgtttttgttctcgtgatttggctgatagccttagctatccgcgatatccctggccgactgtcttctattaccattattattttatcgctgactattgcttgccgatatatttggtggcgctatcaatacacactctactgggtggataatctgagccttttctttgggatcttactattactggctgaaacttatgcatggattgtgttatttcttagttttatgcaatgtatttggccactccatcgacaacctatttcaatgcctcaagatacaacacaatggcctactgtcgatatttttattcccacatataacgaagcgctacaagttgtaaaaccaacactttatgcctgtttaaacattgattggcctaaagataaattaactatctatttattagatgatggctctcgccctgagtttgcggcttttgctaaagaaattggtattcaatatatcactcgtgaaaaacatgattttgctaaagccggcaatatcaaccatgcattgagcaaagcctgcggagaatatgtggctatttttgactgtgaccatattccgacacgctcattcttacaatttactatgggctggttcctaaaagacgaaaaaatggcattggtacaaacaccacaccattttttctctccagatccctttgaacgtaatttaggcaatttccgcgaaacaccgaatgaaggcacgcttttttatggattagtgcaagatggtaatgatacttggaatgcagcttttttctgtggctcctgtgctgtattacgtcgttgtgctttggatgaaattggcgggctggcagttgaaactgtgaccgaagacgcacatacctcattacgcttacatcgccatggttggacttccgcttatattcgtatccctcttgccgcaggattagcaacaggatcactttcagcacatattggccaacgcatacgttgggcaaaaggaatgatacaaatatttcgtttagataatccactctttggcaaagggctgacactgccacagcgcttttgttacctcaatgccatgttgcactttttatcaggcataccaaggatgatcttcttattagcaccactaacgttccttatctttcatgcctatattatttacgcacccgccatcgctatcgctttgtatgtcgtgccttatttattacacatttggttagccgcgaccaaattacaaggtccttatcgccactcattttggggagaaatttatgaaacgattttagcttggtacaccactcgccccgtattaagcaccctattctcaccttataaaggtaaatttaatgtcacagagaaaggggcaattatgaagaaaagttttgtcgattggcaaattaatcgcccctatattctgtttcttaatcttaatttgttaggaattctatttgctttctggcgtatcgcaacaagcgatcccgatgaaaggttagccgtactcatgtgcttagtttgggtatgctataacttagtattactaggtgttgccattgctgtttctgtagaagcaaagcaagagcgacagttcccacgggtacgtctaagagtacccgcaatgctattactccaagacggttcgctttattcttgtcagctcaatgacttctctgataatggctgtgccattgtattaccagataattttacagttcccttatcttgtcaccaagagatcaccgttattctcaaacaaaatcaacgtgaatatgcttttgaagcacgtattttacggattgataatcgcattattggcttacaactgcttaatatggatacacaaaaatccattgattttaccgcctgtacttttgaacgagccgacacttgggctaattggcaacacgctctccctgccgataatccactgaatagtttaagaaatatcatttatatcagtatgcggggctataacaccttacttaaacgcgccccgtatcttgtttacctcttatttcgtttattagggcagtgtttattgtggctattatcgctacttccacgacgtgtcaatgtttcacaaatatttcattaatcttaacggtaaaactcagctttttgggaatttattaatgaacaataagatctatgggtaataataatgaaaaaatattttctactattcgccttacttatgctttccggtttagcttatagtgatgacgaaaaagaagtgccagcggttataacggaacaacctttcataacggttgaagaagagaaaatcactttaacatcaccggatcagataatcccatctcgccaagaaacacgactatttgcaacaacagcacctacttatggagctctaaaattacaaggcgctagccctgatggttatctagaatttggtgttcgtagtgatgaatatgtttcacaggcaatattagatctagagtttaccccctcgccttcattactgcctatagaatcacatcttaatatctatttaaatgatgagatcatgggcgtgatccccctgaaaaaagaagaactcggccataaaaaccacattacattaccgctcgatccacggtttattcaagattttaatcatttaaaatttacttttatcggccattaccgagaaatttgtgaaaaccaagccaataccaccttatggcttgatatcagcaaaaatagccaactgcatctcacctatcaatcattgaaattgagtaacgaattagccaatttccccgagcctttctttgatagtcgcgattttggtacttttaccttacctatggtgtttagccaatcccctaatcttacccaacaaaaagcggcgggaatactcgcttcttggtttggtacacaagtcgattggcgccagcaacactaccctgtgtattacaatcagttgcccaatcaacacagcattgtatttgccactaataaacaacaccccaactttcttaatacacatgccaatgtcaatgctcccaccattgaattagtctcacacccaacggatccttatgtaaaactgctgttagtaatgggtcgtgatgacaatgacttaattaccgccgtcaatggtattgcccggggacaagttatttttagaggggataccgtcaccattaatgatgtcaatctattggcaccacgtgaaccttatgatgcacctaagtgggtacaattaaataaaccaatctactttaataccttgcaagattatcaaggtcagttgcaatctcgtggactagagcctgctcccatcacactcaatatgaccttacctcctgatttatttatgtttaataatacaggactacagatgcaattgcgttatcgttataccgctccggcatttcaagatgattctcgtatgtcgatttcagtcaatgatcactttatcaaagcctaccctttagagagagataaaaaagagaactttattgtggcttatctaccgttaattcaaggttggatcgaaaacaaaaatctcctcaatatccccgcggtaaaattaggtgaacgtaatcagatccgtttctcttttgactatacaaatccgatccccggaggctccgttgatcaatgtattacttatcacccagtccctaacacggtagcattagatgaattatcaagctttaattttactggtaactatcgccactatattgctctacctgatttgcgtgtttatagtcatgctgggttcccatttagccgttatgccgatttgtcagaaacccttatttatgtcaaccaatccccttcacctgagcaattaacaacgttattgatatcattaggtaatattggtgcacaaactggctatcccgcgttaaatgtctctttaactgcatcattagaggaattatcaaaacaagaagctgatttattattaatcgggacaattcccccagcactcaataatgataaacagatgaatgtcttgattgataaagcacgtagcgaaattacactgccatcacgtgaaatcaccatttttagtcataccaattatcaagatctagataagcgcccagatagcagaacatctttaacatcaaccggatcactcggcactattattggttttcaatctccgttcttttcacagcgtagtgtcgtggcgctattagccgatagtccccaaggttatcgattattaaatgaagcgataagtgatagtggtaaacgtgatgcaatgcatggctctgtggtattagtcagagagtctggtgtccatagtttacgtgttggtgatacctatttcgtcggttatttaccttggtgggaagaggtttggtatgtttttgcttcgcatcctatttggctagggttagctgccattgtcggtattgtgcttatttctcttcttatttggcaagcaatgaaaataagaagccaacgtcgtcttgcggataaggagtaagttatgatgtggcgcatttgttatcaatatcgccaatatctccttgctcttagtttgctggcaggcattttgcctgtcacgcaagccgcagatgatccgactgaaacttttttatatgagcaagttagactaggcaactcgaaaagtaacgatgttttagtttctcaatcactgtatcgtttatcacttataaaaccgaacgatcctagtgtgttgttaatgcgtatccaatttgctgtaaaacaaaaagaaacagcaaaagcacaacaactggttgagcaattacgtatgcatggcgaaaatactgaacaatatcaacgtgcgattaagctactatcattaacccatgaagataaccgccaaatcctacaaaaagcctacctttatcagactgcgggtcgttatgatgaagccttgcaattatatgatgatatttaccaaggcacgccccctgatgaagggttagcccttgagtatctcaatgtattaattgcttcaagccatgccaacaaaatggcacgtattaagcagatttatcacacttatcccaataaccaacagatagctaatatctatcagcaatatcatcttaccccagcattatctaccgcatcggcgggctctgtctcctataacacactatctattcgtgcattaaaacagcagttacgccagcagcctgataatgcagatataatcggaacattaggcgtgcgctattcgcgcgcaaatcaacgagcacccgcgatttattatctttctcaagcactcacattggctcccaaacacaacgatagtgatttgtggcgtacgctgttgcaatcaaatcaatattggcatttacttgccaaggctgatgaagcgttattaaatcaagagtactctaccgctaagcgctattttacccaagtacgtcaactcagcccctataaaagtgaagcttatattggtttaggggatatcgagttggcgctgcatcaattagagcaagctgaacgttattatcaacaagcgctacaatatcagcctaatgatgcggcgactttgcatagcctgaccaagctctatcgtcaacaatcgcatcaaaaagccgcccaatttatggctaacttaacatcacagcaatacaaaaatttagcccaagactatgggtatatcatttcaggtatacaacaagacttagctgctgatgatgaacagcaacaacactatctcagtgcgattgagaaacgtaaggctatcgctaaagcgtatcctgatgaagtctggaatatttatcgtctggcggatgatttacttatcactcaacaaccccaacttgctgaggattactttaatcaacttaatcaacgacgacctaatgatccctctcgacgatatgcctatgcgttatatctcaataaaacagggcgagcacaacaagcacttaacaccttaaagacgatccctttatcgcagcgcagtgaaagtatgaacgccttagatagccaattacgttttggtcaaattatggcgcatgcacaatcactaagagaacataaccaacaacagcaagctgtcgaatatcttttcacccatattcctcctgagcaaaaaatagaaagctatctgttattagcgcaatgggccgaagaagatgaccaactcaatcaagcattaaattattatcatacagtattaaatttagcgcctaataatgaaacagcactattaggtgcaacagagatatctttagcgcaacatcaaatagatcaagctcgttattacttagctcagatagaacaattatctcctgaaaaatttaaccactattcactaagacgtttagcaaacgctgaaaaaacggcgggaaatattgataaagccaaacactattttatctatttagctcgccaagttgacaaggagccagatagtgctgatggattaattttacgtgatattggtcgtttttatcgtgatagccaacaagttcaatccgctcatcactattatcaacaagcgatgctaaaagagggtatcacggatacactgccaacaaacaatattgaatacaccacacttatgcgtaacaacccaaatgataattggctatcacgtagtgtacgtgatgatgcaagtaccctttatcgtcaacaagagtggcgttttgccctagagcatgattattggggatcaaatggcagtgagggatactctaaattacgcgctcataccaccatgttacaactggatcatcctatttatcatggccgtttcttttggcgtactgattttgtgcacttaaatagtggcacattaggtacagcgccatacgatgctaaatttggtagttgttatcgcataggttgtttccctctaaagcaaaaagcctttggtgttagtcctgctatcggttgggaaaatgagcaatggcaatgggatttaggtaccacgccactcggttttaatgtgactgattgggtaggtaaaattgcttataacgatagtttttatcatctcggttggagtgtagatcttcaccgtcgcccggtaaatagctcactacttgcctttgctggccaacgtgatagttggaccaatcaaatttgggggggcgttagaaaaacggggcttcgtttaagtggcagttatgatctgggaggcaaggatgggtattggggagaaatatcgcttgatagattaacaggaaaaaatgttaaaaataacagcagtgtaaaagccatgggtggttattactataagttaatcaatgaaaatgatcgccgcatttctgttggcttaaatagcatgctttggcattacaataaagatcttagtggctacaccttggggcaagggggttattatagcccacaacaatatctctcattctcactgcccgttaattaccgtcaacgtactgaaaattggtcatgggaagtatctggctctctctcttggtcttattcaaaaacctatgatagcagacgttatccattacaaaatctcggttcaagcgataaatttaattctgatcccataaaagaaatatttaagcatgagagaaatatcattgataagggggattcgggtcatggttttggttatacagcaagagcattaattgaacatcgaataacaccacattggtttataggtgccgctatcgatattcagcaagcgaaaaactatacgccaagccatgcactaatgtatttacgctattcatttgatggatggaatggtgatttagatcttccgcctaacccgcttattccttacgcagattttaaataatcccgtaacaagattaaacaacaaacagacagctaatgcggtccgtttgttgttttttatcgcgtgtgattaaaatagtgatgattattgtggtttgcgaattaacccaataaatagccacccaacaatcatagctgacacaaataatacaccttgggtaaaaccaccccccgctaataccaaacccggtccggggcaaatacccgcaagcccccatcctaaaccaaataagatactgccgaagacgagaggtttatcaatcactgttttagttggaatggccagaggacaggctaataaactttgttgacgatgacgtgcaatttggtaactaatagcactgacgataagacccgcccccataataaataacaatgacggatcccaatctccacgaatatctaaaaatgccaagatcttttgtgggttgctcataccaccgatgatcaatccagcactaaataataggccactaataaaagcaattaatttggtcattatcttagcctccgatgacatggcgttgaatatacacagtcacaaatgccgtcaccataaagacaagaactgcaacaatagaacgacgcgataatcgtgctaatccgcaaattccatgcccactggtacagccattccccagacgtgtacctgctcccaccagtacaccggcaatgatcaactgccaaggtgaaacgtcgataataggtgttaacggtttatcgaatagataaaatagtgtcggtgtaatcaacataccgagtaaaaatgcccatcgccacccattaccttgttggttagtggttaatactcctcctaaaatcccactaatacctgcaatacgaccattaaacagtaataaaatagccgctgctaaacctattaatagcccacccaatgccgagctccaaggcgtaaagtgaacccaatctatattcataagttaacctgctataggacaatatagctgataaagtgtatttaatagcaccaatactttttcatcagcaatagaataaaaaatacgttttccatcacgacgagtattcacaagcccttcatttcttaacacagtaagttgttgagaaagcgtaggctggcggatccctaaactttcttccaattcactgacacttttttcgccctgacttaattggcacaataagagtagtcgatcaccattgcctagcgttttcagcatactagaggcttcattagccgctaatttcatggcttccaataaatcaggttgaactcgttgtgtcatggtaaactccataatcaatatactttttaataatatgttaatttatatattgtgcaagttttcttttattgcgtgttttaataaggcgctatatgctctctaatatgaaaacagtaagagtccctatcgccttagtgcaaagtgttatgcgtacactgcgtgaaaaactgcaacaggccaataaatatcttaatacagattacccagaacccactctacaatataaccagagaggaactattgcaggcagtgcctattatgcaaattgggagatccgtcttaatcctacattattgattgaaaataaacagaattttattgaagaagttattcctcatgaattagcacatctgctagttagtcgccattttggtcgtgtggcacctcatggcaaggagtggaaatggatgatggaaactgtgttacaggtgagtgcgaaacggacccatcattttgatatcagcaatgtaacagcaaaaacgtttagctatgcttgtcgctgccaagaaatacaccagttaactcttcgccgacacaataaagtacaacgaggagaaacccagtatcgttgtcgtcattgtcaggcgattttacaattaattaaagagtaaaaaaagtaagcttggtctttaagactaaacgtcagccgaggttctgagtgacactgagcagggatgttagtataaacactggcaataaaactgcgggaagtcatttcaaatcttgatgaattcaaatgatcaattaagtaaaagtatatcaggcaaaaagatagagaaacttattgaattttatgcaaactatattcaaatacttcacaaaattacagtgaatttatcaaacgttgcatcattgcaagtaaggaagtttatgatgaaaatagaaaggcaaatgcaatatcgcatgtaattcaagtaaagcctgaagagccaaagaaaaatattcctactaaaaaagatcaagagtaatttctcactgagtcatatagccaagatcaaatcatctagcccatccttgggatgggtgatggtatatatcctttagctttaaatgatgtatactttgtatgcgtatctatttcagcgaaggtaataaactatgatttctgaggctattatgatggcaatgctatcaaatccaatggataaaaaagatgtggattcaggcttggctaatttagccatgtcgatagctaccattgttgataaaaaggcaaaaggtgatgtatcaccagatgaaattatggatttaattgttggtggtaagaccgtgctaacgacccttgttacatcaatcgatgaaatagtggctttacttgatgacccaacaaaagatgacataaaaaaatatgcaggtaataaccctgatgaggttatgcgtgaattggaacgaatgattaaccatggtaataatgtagttatgatgattgaggcaatgtatagcattgctaaaactaccaaggcttttcatccatttgaaagcatagctgatggttacttcaaagaagttattattaaaatggctgcactaagaaaccatacacaagcactttatagacaatttaatcagcatattaacccgttacccgcaatggaggttgaagatggattcggtgaagaggatatagcattgtttaattcctcaatagctgaatttaatcaagatctgcttgcaggtaacttgcaatgccgatagtcacaatcacgcccagatataaagataacggtgtttatcggaagtatgcggctaagctatcagctgctcttaatggctcatccctctctgggtatgtaggtaaatttgctgattttaggaatagcgccatagcgcgtcagtcatttattgaaaaggttcatataagaacgccaaatgaaaaaccttgggatggcgaaactcgacaggctgttagagtgagcgataactttttagtgttttgtaagcactgtatgtacgatgattattaccaaattctggcaatcataactcctgatgcacatgctcgttcagctgcgttgcttccaatattggcagatatggcagaaacttattttcattctttatcgcttaaagagttagctggattagatcagttctagccacacatagctcaaggacgacttgcttgagatcacatagcgggtggttttatatttaagacgctgacgcgacttaaacaggctaaagcccataacaaaaaataaagccgataacttgttagtttatcggctttattcggtataaataggggagaattgatatattaagcaaacacactcatagtatgagatgctatttcaaagtagataataagcccagtgccatcaataaacgttgcaataaaaggtgcagacaccaccgctggatcaacaccaatacgctttaataccattggaataatagaagagacaatagcactccaaaccgtaattgaaattagcgttaatcccaccactatcatcacttccatgccaacccctaaggtccaagcacgaataaatcctgctattcccatggttaaagccaccattatcgaggtcgtgatctcttttcttaatactgaccatacattacgcaaactcacctcacctaatgccatggcacgtactaatgttgaggtaatttgtgtaccgctattgccaccagtaccaattaataatggaataaagaaagctaaagagatagcagcttcaagtctgtcttcaaaagcatgtaacaccgtactggtataagcttcagcaataaacagcattaatagccagacaacacgtttacgccacaaagtaaccggacttgtctctaaataaggttgttctaatggcgacgttgccccctgcatttgtgcatctagcgtattttcatcttcaattaaatcagcaatatcttgaggtcgtaatacaccaactaacttaccaaaatgcatcacaggtacactgtctaaaccactttggctaattaactgataaacatcatgtcggctttgctccggtgaaactgagaaaaatgtttggcgcataatatccgaaacaaaaagctcattatcagcaagtagtaatgatttaaccggcaaaataccgttaagataattatctttatctacgacatacagataagttggaattaattcatcttttaaatcattaaccagctgtgcttttacatgttcaaccgaatctgcgacagaaacagaaatataattctggctcatataagcactaacggtagcatcatcttttaaacgatgatgttgctcttgtattgaatgattattgggtgtgtttaaggatgcgcctgccattaatgcagcatccattttatgttgaggagtaaatttcatttttttggttccctatgactgtttgtgtttagcaaatcagttctcaataggggcgaaaccagatgcgagaatgcaaaagctatctacacgtctcggttttagcactatacaacgtatccgatgaatactggaagttacatggagatataccttcggtcgatatatcttgtcctaatcttgggcgtctctcgacgtcgtcagatcagtaacctgtgtttgtataggagcctcgcctaacgagatactgcacttttcttgcgaatgcggcgcgcattataaccactcacattataatgaaaagtctcatcgtagttttgtttaagttctattgataaatcttaaatcgcttatttttacatcattaattaaatactcacctcaaatagagatgaataaaatagttttaaataaattggttattaattgattattttaatgctaatttttgtacttttatttcttcagcttgtgagaagatctcattgactgttttaccatctaacgattgacacatttttcgcgtgatcatatcagcatttttattgcgcccagcaatgactaaatcattaaaattaatatcatttagcatggctaattctattgcttcatcaaagcgttgctgctcttcaagcggtaatgaattgcgcatttctacaatcgatattcgtaatgactcaacattagagccatctagggtttgatttttttcgcaaccagaaagtatgacagtaaataaacaaataaataacaattttctcatatatcccccctttccctatcataaattaaataatagcagaatgtgtatcagtaaactgctaattaagtaaaataaatatttaattcattatagctttacgtgttatatattatattgaataaataaactctctttttaaaaataataacaaaaaaccccgctaataaattagcggggtaaaatagaaggatagataaagaatagataataaaatgaatgattaggctagttcaacatcacctgttaatcgacaactacaggctaaaacataaccttgtgctatctcatcagcagttaaagtactggtgctggtgacctcataatcacctttcacaatgcgtgttttacagctaccacacactccagcacgacaagcagccaaaacaggaacactattttcttccatcgctgttaataatgtcatccccaccggtacgttaatttgctttaacggatgacgaatagtcatagtaagttgttgtgcttcatcaacacacattggctcatcaccaaaacgttccataaaaatattctctgcacaaacaccaagatttttggcaaaacgcgcagtatcttccatataactattaggcccacaacacataactgtacgattggcaatatcaggcactaaagcggctagtttttcttgagaaatacgtccactaaaaattcccttatcatccggcaacttaggcatcataataaaattgagattatagggataagcattagccaactctaaccactctttttcaaaaataaattggctctgttcgcgaatattaaaaatgaccgtgatatccgctttaggttgattatttaacaaccaacgcgtcatcgacataataggggtcacaccgcaccccgcagcgagcattaaatagcgcgttccttctctatctgcacaggtgaactccccttgtgcgtctgataaccagagataatcccccggcttaacttgggatgttaaccacgttgaccccaccccattgtcgatacgacgaaccgttaaagagacaaaaggacttaatcccggagaagacgagagcgtataagctcgcatcgtttcatcgctattattaatactgactagtgcaaattggccgggtttatagcgataaaaatcatggttaattaaattcagtgtccacacttccggggtttcctgatggatagagtgaacttgcatacgattaggacaaagagctgttggcatcgtcatggatattgcttccttaccgaagcctttaggcttcggcaatgatgatgaataaataaattaagcagaaagaatttcttgaagatcttgttctggcgtggtgatcgcacgcataccaaatttttcattaagtattgcgagcaaattatcggttaaaaatgcaggcgcagtcggcccagtataaatattttttacccctaatgagagtagggttaataaaataacaatcgctttttgttcaaaccacgacaaaatcaaggacaggggtaaatcatttacaccacaacctaatttttctgcaagattaaccgctagcataatcgcagagtaggcatcgttacactgacccacatcaagtaagcgcggtaagccctctaatgtgccaaaatcaagtttattaaagcgatatttaccacaagctaatgtcataattaagcaatcttggggaatggcacgagcaagatcggtatagtagctacgttcaccacgactaccatcacaccccccaactaagaagacatgacgaagttttttctgtgaaactaaatcaatcactgtatcagccgcatttaatagtgtttgacgaccaaatccaacagtaattaagtgttcaatttcactgtacggaaatccctctaaagagagcgcttgctcaatcatttcagagaaatcatcacctttaatgtgtttcacacccggccaaccaacaatactacgcgtccaaatacgatcgccatagttccccacattaggatcaataatacagttagatgtcattaacacagggccaggaaatttggcaaattcactttgttgattctgccaaccacttccgtagttaccgactaagtgtttatattttttcagctctggataaccatgggcgggtaacatttcaccgtgcgtataaacattaatgcctttaccttcggtctgttcaagtagcatctgtaaatctttcagatcatggcctgaaattaaaatagctttacctgctactgggcgtacattaacggaaacaggggttggatcaccataagcttgagtttcacctttatccaataacgccataatacgaaagttcatttgaccaatgcccattgcattgtctagcaactcattcatatccgcaggatcggtacctaaccatgccatgtaacgatgatattcagcataaatttcatcatcgtactggcctaaaacatgagcatgctccatataagcagcagcaccttttaagccatacaagcaaagcatacgtaaaccatgtaaatcatcccccacttgcgctttatcattatttaatgcaaagcgttgggcttgtttctgtagactggctaagtcgttgccttctaattgaatttcggctttaggatgagcgacttggatggctgcatttttggctaacgtacgtgattttaagctttcacgtaaataaatagcctctttggcatatccaacaatacgttcagaatcaaaattaacattggttaacgtcgagaagaaagcccgtggcgcaaagctgtctatatcgtgatcaataatatcaacactacgcgcagctaatgcccatgctgacagcccttctaatactgccaccaataagtcttgtagatcagaggtttctgctgttttaccgcacataccttgtgcataggcacaaccattaccaacaggtgttctcattgtttgttcacattgcacacaatacatatcgaattccttctataagatgacgctttatttttataagttgcattaaatatgcaacataagaatacgccatttttatagtaggaaaagtgtcagatgaaataatctgcgccatgtttgatctaacgcaatttattgctgtgcttaagagcttgcttttttttctgttgatttggcttcacacctcgtaagagggtgagtaaacaaagtaaagggcttttcttataagggaaattgagaagaaatgttgcagtgtcgcacgggatgattttgttacatctcagctaaaaaagagtgagatgaatcgattaaattaattagttctcattgtatatataatatctatttattatttttgatagttaatattacctattgcatcaatagctaataaaattactacaattgatatattttaatagtacgagtattacgaaatgaaactatagaatttgacgatactccccctacactggagattaaaaatgattaaattaaataatgttccatccgaatttcgtcccttagaaagctacaaaatgttaatcggcggcgaatgggtatccagtacatcgcaacaaacgaccaaaacctatagtcccgcaaccggtgagttattaagtgaatatccatcaggtacagctgaagacgttgatcttgctgtaaaagcggctcgtaaagcttttgatcattggcgtaaaacctctcctgctcaacgccaagcgctattattaaaaattgctgaccgtttagaacaagagcaagaacgttttgcttggattgagtctcttgataacggtaaaccactcaatgaatcgaaaaacatcgatttacccgcctctattgaccattttcgatattttgcaggcgtgatacgctctcataccgatgaaagtgctgtcttagacgaaaataccctgagtcttgttattcgtgagcccattggtgtcgttggacaaattattccatggaattttccattattaatggctgcttggaaattagcccctgccatcgccgctggagataccgttgttattaatccagccacactcacctcactttcattattagagctaggtcgtattttaaatgaaatattaccagccggtgttataaatattgttactggtcgtggatctgttgctggacaagctattctagaacaccaagacattgataaactagcatttaccggttcaaccaatgtaggttataccgttgcagctgcggcggcgaaaaaaatggtaccagccactttagaattggggggtaagtcagccaatatcgtcttccctgatgcgaatatgaaaaaagccgttaaatattccgcactagcgatattgatgaaccaaggacaggcctgtgaatctggctcccgtttattcttacatagagatattcatgacgcattcttaaaagagttaaaagcagaatttgagcgtatccgtgttggtgatccacttgatcctaatacacaaatgggtacccaagtcagccaagcgcaaatggataccattttagggtatgttgaactggccaaaaaagaaggtgcaaccatactcacaggaggtgagcgtattacgggtgaagggtttgatgatggcttttttgttcgcccaaccattattatcaatgccacaaaccaaatgcgtgtcgcacgtgaagaaatttttggccctgtattatgtgtgatcccatttgataatgaagaagatgttattgaaatggctaatgactctgaatatggccttggtggtggtgtctggactcaagatattaaccgcgcactacgagttgcaaaagccgttagaactggccgtatgtgggtaaatacttatcatgaacttcctgctcatgcaccatttggcggttataaaaaatcaggcttaggtcgtgaaacgcataaaatgatgttagatgcctacagccaagtgaaaaacatcttcattagtaccaaagaataattaacctctagttaagcatattcttataaatataattatctatactcatctcttagccttctccccagaaggctttttatttgctgtaagcaacaaaaaaccgtatgcgcttttcctaatatctaatattaactgctcacatacggttattcgtttagatggtcatttagccttagataaacaaacgcgtttattccgcttctgcttcttttttgcttacagaattcacttgttcatttagatcaatatcaaccgcattaacatcttttatatagtcttttgttagacgataaacgatggggctaagcagtgctaatgcaattaagttaggaatagccatcatcgcatttaatgtatcagcaagtaaccaaacaaattctaaggattgagtcgcgccaattggcaaggcaattaaccatgcaatacgaaaaggcataatggctttcggtccaaatagatattgcacacatttctcaccgtaatagctccaacctaaaatagtggtaaaagcaaaaacagccaatgcgatcgcaacaatatagttacctccagggatagccatagagaacgaacttgcagtaagtgttgccccactttgccctgtcagccactgtccggtgatcacaatcgttaatccggtgacagaacagacaataatggtatcaatgaaagtccccaacatggcaattaagccttgacggatcgggttttgtgttttggctgtcgcatgagcaatgggtgcactacctaatcctgcttcattggagaatacacctcgtgcaacaccaaaacgtattgccgcccaaacagccgcaccagcaaacccaccttgcgcagcaaccggtgtgaaagcagattttacaatcaacataaatgcatcaggaatagcagtaatattcagtgcaagtacgacaatccctgccccaaaataccctactgtcataatgggcactaatttaccggcaacatcagcaatacgcttaattccaccaattaatacagcaccgactaaaataactaatgcaattgctgtcactgtggtagaaataccaaaattactttgcaaaacatccgccactgagtttgcctgtaccgtattacctataccgaagccggcaaaactaccaaaaatagcaaatagcgttcctaaccaaagccattttttacctaaaccgtttttaatataatacatcggtccgccaacgtagttgccgtatttatcaacctcacgaaaacgtaccgctaacacagcttctgaatatttagtcgccataccgactaaagcagtcatccacatccaaaatagcgctcccggtccacctaatacaaccgctgtagcgactccagcaatattgcccgtaccgatagtggcagaaagcgccgtcattaatgcattaaaaggtgagatttgtccctcacctcttttatcatttttctcaaataagagtttaaatcctgtacctaattttctaattggcagaaaagagagtctaaactgcataaatagaccgatgcctagaatgccgactaacatcggtactccccacaccacgccattaatagcgcttaatatatttgtgatgaaatccatacgttaccctttttatccaaatgttatgtaaatatatattttttgttatcagatacactaaagatgaaaaaaaggaaatatgctagaaaaaaaaccgactaattatgaaattgattacattatgtgagaaatatcacttgatgattaaattacgctattattagatacattgttatttatatataaaacataaattatgtatcagcgaaacacgatcaaaaaatcgcaaaatcaacaacgctttaattggtttagaaaagcgaaagaaactaaccttgccccggtgaaaacgcttattctttccgccattatcggtacgttagccggattaattggggtactatttgaaaaagccgttggctgggtcattcatttaagacaagataaattagccgaggtattaaccaacccttatcttttggctattggcacgttacttgtttcctctcttttagccatgagtggctactacttagtgaagaagttttcaccagaatctggtggttcaggtataccggaaatcgaaggggcaatgatagatattcggccagttcgttggtggcgggtattgccagtaaaatttatagccagtatcggtaccttaggctcaggtatggtacttggtcgtgaaggccccaccgtgcaactaggggctaatattggtcaactcattaatgatgtctctcgcgttaaagataaaggaacgcgccaaacactattagccacaggggctgctgccggtttaacggctgcctttaatgctcccttggcaggcattctatttattattgaagagatgagaccacaatttaaatataatcttatctctattaaatccgtcttcattggcgtgatcatgtcttgtattgtatttcgcctaattaatggtgaaggaggcgtcatacagataggtaaattttcttcagcgccgatgaatacactgtggctctatttagtgttaggaatgttatttggtgttgttggggttatttttagtaaattactgttttatgttcaaacacaattccaacatttttatcaagataaaacctcacgttttgttttagccggtggcgtgattggtggtgcatgtggtttacttgcgttgattattcctgaaataaccggaggcggttttagtattattcctgcattaagtgccggaggatattcgttaactgcactgctaatattttttgtgttacgtaccatcaccaccattatcagcttctcctccggtgcaccaggaggaatttttgcccccacattagccttaggcacactctttggtagcgcttttggattaatggcaacctatcttttccctgattatcaaattcaaattggcacttttgctattgctggaatgggtgctttatttgccgcaacggtgagagcaccactaactgggattgtgttagttctagaaatgaccgataactatcaacttattttgccaatgataattacctgtcttggcgcaaccatgctggcgcaattattaggcgggcgacctatttatacggttctactcgaaagaatactacaacgctcagaagccaaagaaaaaacagaggctcccaaagagcccctatagttttcaaatactaaaataccctcgctgtgatctaacgagggtatttttctcaccatctatttattattttttacgcgcaattaatgtcgcaaaattaagttgaatacgattaccattagcatcagttttatgtagatgccctggattttcattatatttaataatatcccagccttggtaataatccgctaactcaccttggcgcaagaaggttttgaaaggaacttcagcagatccactatttgctgtttcaacaggacaaacaatgacattaatcccctctggatttgtacactcctgcatatttttaataatatctgcgatacgttgacgctggcaaaacatcaaaaccacagtagaaataataatatcgtatttctcatttaatgctgcttcatttatatcatataagccgcttttgatcgctaaaccggttttagctttgacggcttcaattgcatcaatatgagcggcattaatatctaatgcggtcacatcataaccttgtaatgctaaatagaagctattacgaccacgccctgcgcctaaatcaagcactttacatggggtagtcaatgttgccatataacgcacttccgaatgaggtaatgacaaatcattttctttaaaaaatttatcttcgggagtgcataaaaaagagagctggcaaagcacatcatcactcgctttatcgattttatgccattgctgaggttgaataagcggaggctgattttcgctatcacactctaggaacacttgttctccattatccttaaatagcacaaatgtcatactcccttgtaatatccgcatttgcgcataagtgccttcttttgtgttatgacgctctaataatgctaaagggatcgctgttaagtgccattcaggtagcgttttatacgtaacaagttccataattcaacctctcttaagatgcattttaaatacatcttattgcaatcactctcttaggtaaagggtgatttttgacatacattattttaaatatttattgattaataaatcagtaacatcagacgaattaatagattcaccacaaaggactttcatcataatttctttgcctaacgaagctaaagacaacagcatatctggacgtaatcgacttattttttctctattctcatctttattaatgatagtgattaatttcgcttgaagatctgggcactcttgaatagttaataaaataaaggtattttccgcatcactttcagataacgtcgccacccaactcgcttggcgaatatttgccgtttgtaatgtttttacattggttggatcaccttcaataatattggcttctttatcatacatggcttgctttttatccgaacaaatcgcaataaccggtttaccttgctctctaagccctttctctaattgtgctgccaacattgaagagccaataataataaaatgatcatgcattttagcgatccttttcttcacaatatcgcgagtaccacgagccaaaaatcccatcacataaacaatagaagtcgtaaaaacagtgatccccaaaataaccactgttagggtaaacattctcgcattacttgagataggaacgatatcgccaaaaccgagtgttgtcatacagacaatggaaaagtaaaaagcatccattaacgttgtgatatgtggtttaaattcatcaccaatatagaggctgcctaacatagagaaacacagtagcgaaatcgtacagataaaagcaacaaaaccggcactggttaaactatgatgaggaaaagcacgccggctgataaccaatacaatggctaatgctaatgaagtataggcttgagtaccagcttggtgataaaccgcgacatctaaaaaaacgatcgtcactaataatattaatgaaacgcaccacgcaatccgcgcccccatatacataaagaaagagagcaaaataagtgcactcgctaacatcactttaggaatatcaagtaatttcaatatacctaacgattttagccaatcagcaaaaccgtgtatttcccaatcaagataaacaccacgagaaagtaatatcgagtaaataataaaaagactattcaagatcaataagaaagacatcgtctttctgctaaaagacgatgtctccataaaattaacgactgccgataacttcatttttatctaatttctattaattttgtattggtatattttctaaccctttaaatttaaaaggtttcgctggcttaaactgagagcttgcatctcctgaataaatcgttgactgctcttggcctaacgctaacatcatcacttttcctgtttcttttgaaaaatcaatttgtttcaaatcaacccaaaaagtatttggtgataatgcagattcaaaaaagtagagctgatttttatgatcagcgacagttctccaacgagtcgatgatatttctggagattctacggtacttaatccataaggcaccgaaacattgcggatcaccccaaatacactggcaagtgattttttgctcgattgcgatttaggaatagcattaatataaaaagaggctcttgcaaaacgatccgatgctctattagtacccggtaacattaccgtaccaccaatctgctgccaatagctatttaatgctaactgttcagaaaatataggggagttagtcatcacttgatattttcggctatggtggatcacctgtttaccatcaatatattcaataattgcgctatcaccagaactgtcagacaatgataaatgtaacgttgcgactctatcctgtccgggtactttgtctgttaagacaataaaaggctcatcttttaaagcagttaccgcctcttcaacagtagcaaaattatctaatacatattgtgcccatgcagaaatagccattgcaggcttatctttggaataacttgggtaatctgattcagcaagccataataaattagccactaatcctttttcattaataccatcagtagtagaaatatcataacctgatgcaatcacactaccatattttgattgccattgaactgaattatcaccagcctcaccagaacgttgcattccttgagggaatatccataaattagtaccaatttcgtatttccagtccatagaacgagcggtaattatttggttattttcacctaaataaacaactcgggtacaagcttgcgccgtagttatactacttaaaaaggtacctgaaataattaatgtacttaataaagtatgtcgtaatttttttagcataatttttcacctttaaattattagataagcttaatcttattttcctcattttgaccactttcttatcacttataaaaaataaactctctaataattaataacgatttatctatcttacagaaattttcttaagtaagtataagacaagttacgtatcttaagtaaaaaaaaactgatgctaaaagcatcagtttttaatctattaggtgatatcgcaaattattgcttaccaatattcgctacgtttaattttttttcacaccttcaacagagatgattaattctgcttcttgcgattttggtcctaaatctgatttaaagttaaactctttcagattaactttacctgttgcttcaaaaccagcgcgataccctttccacggatcagtaccttcaccaattaattttgcatttagtgaaattggttttgtaacgccattaagtgttaaatcacccgtcaccgtataattttcaccatcacgagtcactttggttgagacaaacttagcttcaggatatttactgacgttaaagaaatcagcactacgtaagtgtttgtcacgttcagcgtgattagtatctaaactacccgttttaatcacaacatcgactttatcttttgaaggatcttctttatcgtaagtgaagcttccatcaaaatctttaaatgtgccgtataaccagctataacctaagtgttggatacgaaattgcacaaaagcatgttgcccttgtttatcaatttgataatcagccgctaatgctgaactagcattaaataataatgcacctgcagttaaactcaataacgccttcttaaacattgttctctccataatattgttattaacagggtaatataaatttaattattgtgtttttatgccaagcatacgtttcaatgtaatatctttatctataaagtgatgttttaatgcacccgcggcatgtaatagcgataacacaacaaccgcccaggctaaataaagatgtacatcaccggctaaatcagcttgttccccttcccctgtgaaaacagcaggtactgagaaccaatcgaatacagatattggctgaccatcagcagtagaaattaaatagccacttataatgatggcaaataaaattagatataacagcatatgagccacatgggcactaatgcgagtaagtcggctatagctggataatgctgttggtggaggagaaatccaacgccaaattgctcggaaaagaagaacaataaatagaattatccctatacttttatgtatttcaggggctgaatgataccagctatcgtaatagcctaaatttaccatccacaatcctagggcaaacatgccatagacggttaatgctgtcccccaatgtaaaagaagcgacaagtgcccatagcgagtagatgtattccgccactgcataatgatcctcaatcgatattttattaacaagccgttaactatattagtagattaaatataaaatgttagtctaaaattcaacaaattatttgtttatctttttcaataataatcaatgagtcattatcgcttattagttgccttattgattaatttatcaatataattattgattataatatatacaaaaaacagtatataggcgatttatgtaacagtaaagtcgaaggtgtaacaaaaaattaacttaatattattactgtattaatattgttacgataaaagaaaagtagcgaaatgaaatgagaataaataggcgagtcagttaattttaatatcgaaaaaatttacaaagctatatatgatttacttaacatcgcctaaactcaagaattagaaaaaatgagtccaaccacaaaaattaacagcggtagtgtaaaaaaaacagatagccagcgcatttcatgaataataccccaaataattccaataaagctaataataaaaataactgaaataagttcagaatagtgttcatgaaaataacacatcaagaaataaaaccaaacatcctcactatccatacaacaatctaagccttcaaaataatttaaaataaagatagcaataaattactattattatctaataaggcaagtaacctattataaatattagccattgcgcacaaaaacactaatctattttaaattagtaataaacaccaacaaaacaacttaaaatatggtaataaattaaatttaaaatgaattaaaaaacacaatcacaaataaaaaatagcccaccataagacttaaaataatataatgggttttactttagacttgaaataattatttcacccaaagttaaactcaaaaaaatagtttcacattatgataataaaccatcttacttttaacacgaatagagattttaacattgaataattacctttaggttatttatttaattaaaattaactcatgatttcattttaatagttattaactaaaaacattcaatttgacttgaaaaaacactacaattgtagccgtatttttattgagggcactatgtctactgcaacaaatctgaatgaactacaggaacaagttcgctcccgctataatggattaagtaaaaggctacagcaggttgcacattatcttttggataataaaaacagtgtagcatttgatacaatcgcgatccttgcagataaagcaaatgttcctccatcaacattaatccgttttgccaatgcatttcatttcaaaggatttaatgaaatgaaacttttatttcaacgtcatttaatgggtgaaatggataatgaaaaattaacctataagcagcaatacaaaaaggaaccaccaaacttaaatgagccagattatattctgcaagagtttgcacaagccaatagccacgctttgcaacagttagctcatcaaacccataaggatatgttaaataaaactatacaactacttgagtatgcagaaactatctatataggtggttttcaccattcttttagtgctgcgagctatttttttcacgcgctttctcatatcccttgtgaaaccgtctttgttaattgcctagggggaatgtataaagaacaacttaggaatattacacatagagatgtgctgtttggcatccatttccacccttattcagaagaaatgcaaaaaatgtgtgagattgcagcttataaagaggctaaacaaattattgtaacagatagccccataagcccattagcaagtctaagtgatgtttgtttaactgtaaaagaagcacaaataaaaatgtttcgttctcaaacctcaacattatgtttactacaagcactttcagttgcattcgcttttagaaaaaagagccattaacatattatttaaaactgcatcttatataaggtgcggttttattaaaaatagaataaataataattaataaaaataaattaaatagcatgctatattaaacaaaattaattttaagagtgatttcatttattctagattgtgatgagaaaaagaatcatttagcatttattggcaactctgttatccattacaggacgaataacatgctattaaaaaaaatatttttagtgtcttttttattccctacactctcttacgctaataccttaccaacatcaaatatagataattcactaactcccaaccatgataatcttgcccgtttttcactcggtgacaatagtcaagcatccggcagcggtgccactgctataggtatcaatagccaagccaccaatactcgttcggttgctattggttatgctgcattagccaatgaggaaaatacggtttcatttggtaatagtgaagagaaacaaacagcacgactcaccaatgtcagtgaaggtaaaaataatactgatgcagtcaatctggcacaaacaaaagcactacttagtaaaaataaaaggttaactgatagccaaataaatgtttttagaaatcaaactaataataacttaaacaccatcaaaaaaaccattcatgagtttgatgattattatcgaagacgacaagcatcaattaccgatgcaattgaagcacttgataaaaaagttatttcattagaaaaaaaagtctatgcaggtattgcttcctcaattgccatgagcaatattccttatcttactcatcatacttttagtggtggcctcggtattagtaattatcgtactggcatagcacttgctggaggtatccaatatcagccaaataatgatatagcatttcgatttaactcatcaattaatagtgaacaagagcttatttttggcggcggattagcttatggctggtgatcttattaattaacctcacctcttaataagaaagttttttattatttaagcagtagtatccttattgctgcttaacaatatttttctaaataaaataaatgcataacacttattaaaaagataagcttatcttctgtttttattcccttttgtgatagtgacatttttcctataatgacataattctccataactgaaagagacacaacatgagttatccattacgaaaaatgaccctcgctgatatcaaagcagtgacttcattactacaagaaaactcacagtcacagcaaggtggattatatggtgattatccacacgataaagttgaagctatgtaccaaagtagtaccaatgccatagtcgcaactgaccaagaacagattatagcagttgttttcagctttccggtcagttctttttctcttccacctattgctcaagaaattaaccgacgttttcctagccttacatacaataattggttttacggtcctgtatgtattgataaatcataccgcggaaaatcgctattaaccgatctttaccaatatatttgtgcgttacaaggtggtcgcccgattgcatttattaatagtgaaaacatccgctcgctaaaagcacatcaaaaattgggtatgaatattgttgaaaattttcaatttcaaggaaaagcatggtgggtaattagtggataatgaaaacaaatgaaagaaaaagtacgcatatgtattcttcaatgagttacgatatcgaacagtgataatgagtattatttataacaaaaataaatttatatataaaattaattaaaaatcaatatgttattagtatttcataaattaactcataattattaacaatatttgaacccgacttttctctatcaaattgcttacaatttgacaccattctgtgatctctccttcaattctagatctttcgttaacttactttttgatcttacataaaagtataaataagataaacaccaccaattcgaaagcaaacgtaaaataggaggaagcaatgactgtttcccgtagaacttttatcaaaggtcttgccgccagtggggctgcaatctctgtttctacacctgctcttgctacttcaggtgactttacagcaagcaaacgcactcgaccagaaaatgcacctaacttattaattgtttttcctgatgaaatgcgagcccatgctctacagtttatgggggaagatccatcgattacaccaaatcttaataaatttgccaaacaagccaaagtaatgacacaaatggcatcaaattaccctctatgctccccttttcgaggcatgtttatgacgggtcagtaccctgtgcgtaatggtatcacaggtaatgcccatgattacggtggaaaagtaggtattgacttgtctccttacgcaaaatgctggtctgacgtacttaaatccttagattatagcactgggtatattggcaaatggcaccttgatgctccctatgagccttttattgaaagttacaataatccaatggaaggtcgttattggaatgaatgggctgctccagataggcgtcatggttttgatttttggtattcttatggtacttatgacttacacttgaaaccgatgtattgggcaaacgatacacctcgtgataaaccgatttatatcgatcaatgggggcctgaacatgaagccgatatggcaatcaagttcctcaaaaatgaaaataatcaatttagagataattcaaaaccatttgcattagtggtttcaatgaacccacctcactctccttatgatcaagtaccgaaaaaatacctcgatgcttatcaaggtaagacatcaaaagagttaaatacacgccctaatgtacagtgggacagtgaatatcaagaaggttatgggcctcaatatttcaaagaatatatggcaatggtcaacggtgttgatgagcaatttggtcgcattgtcgatgaattagaaaaacagggccttgcagataatactctcgtcgttttcttctctgatcatggcagttgcttaggatcaaatggacaagcaacaaaaaataatccgtatgaagaatcgatgcgtgtccctatgatgtttcgcttaccgggtaaaatcaaaccaggttttgatgatgcattaatgtcagcacctgatatttacccaactattttagggttacttggtttatcggaatggatccctgattcagtagaaggcacagatcttgcagatagagtcatcacaggcaaaggcgacacagcaaactctcagctttatctttttattccttatggtgaaccttcattcggtaaacgaggtgtaagaacaaaaactcatactttggtgatagataggcaagatgggcaaccattaaaatatactttatatgacaatgtgaacgatccatatcaaatgaaaaatattgccaaagataatatgcctttaattgataaattaattaaagaagaattaaccccttggttagaaaaaacaggagattcttggagagcgactgaatttattacagcgacaacgaataaattaaataaaaaaatatcaatatgtgaagaaaaataataaaaacatctgcgccataaccttatggcgctatatataaacctaattcgctaatataaaaatccttttaataaaataaaaggaagacgtcctacatctaaaaatagatataaataaaagcgaataaagaattggatatagaccatgaacaaacttcgtattgtgcttttcttacctctttttggcttagctttaacttcttttcattctcacgcagcaacagttaatgcgatgttctcgtgggaatctgctgattatgatacatcgaataactattctggttatcgtgttgattttaatattaatccagacaaatcgaactggtattttgacgtcggttttcgtcagcgtgaacatgacaataaaaatcgttatcagcgttatgatttacaaggtagttatcgttttaaattaaataatggttggatacaaccaggattaaaaatacgtcaagatttaactaactatgataatggtagccgtttaactatcgacttttatgaatcaaaaacaaattatcaatttcctattaataaagactgggttttaaccggtagtgttttgtttggattacaaaaaaaagaggacaaacgaagtaatggcgtcactaatacggattatttaggttgggaaattgaacccggtattcgctactttatcaccccgaatctaaatacaacagtggcttattttgatggtggaaaacaagcaataagacatgaagagtatgatacaaaagaaacaaatcacaatcagcaattacgtatgtatgtaaactggacgacacctatcggtgttattatttcgccctcaatgcgtaagtctatttttggaaaaatagaagacagaacaaataaaggtgaatatatcgataaagatatgactcgttataccttacaaatggcttaccaaatatctcctcaatggcgtgttatgacagaatattataatgagcgtgttgagaataaaaataacggcagcaagtcaactcaagattattttaaagtatcggtaagagcaactttctaataattaaaaccatataatagtcataaggttatatctcatgaaaaataaaaatttgttatttttaagtgctgctgtcctttcagctatatatggctcagccgtagcggctgattgcgatagtactttaaccatttgtgaaaccgtaaacattaataatggcgatacagcgcaaataaataaagatgttaatgtatcacaaggtgacggtgtagtatttaatggctcatcaacagaatataaagctcaagcaattacaaaaaatattactgttactggtaatggagcaaatgcaattaaaataaatcagggagctacttttagtagtaatattaatttaaatggcgctaacgttactagtgaaaatggtacagcaatattagttgaaggtaactttcctaaacgaggaacaggtgtttatatccgagatggcgctattatcagaggaaaaaccgcagcgattgattttagcactttaaaaacaggctttagaagtgatgttaatggcgagatccacggtgatattttagggaataatcatgtggataccaaaatcaattttgcttatcagggaggagcacaaaatgcattatttgacggctataaaattaccggtgttcctttaattgaaaaccatggcaatttaactatccaaggtaaagataaaaccattcaatgggaaggtaacttcatgaataaggaaaatagccagcttattttccgccttgatgataataccaatactgatgaaactatcttacatgttaccggcgatgtcacctttaaaaaaggtagccaagcaaaacttgattttaaaggcaccagtgttgataacatcattaataaagatattgtattaattgcttcagactcggcaattaaagatgaagcgggcattacagtgactgatgcaaatgccatagcgccagatatttcacctttattagaaaaaaccgattcatggttagaaacgacaccaccaaatattagcggtggtgtcagtggtaatcaattaattgcgcgttatggtattagctacgaagggggggataattttattagcgctgctgaacgtggcaatgtcacagagaatggattagcagcagctaattttattattccaacagtattaaatgaatttaataatacacgtagccaaatttcagatgaagcattaagtttattagtcgccgctggtaataatgataataatattgctgcactatcaaatgatctggcgcccattgctgatggtagtgatattcaagcaggattaatcatggttgaagatatgcgcaacaatattgctcatcgctacttacgctatgataatcagctccccattgaagaaagagaaataggttggaatagctgggcaaatattctgtacggttatggtacgcaaagtcaacaaggtggaattaacggctacaatacttatcgcactggtattcaaatcggtactgattatgaaataaatcaagatgcgctaattggcatttctttagcatataactacgctaaagccgatgctaaacaacgtaatgcaagcaaagaaattagccattttgaatttatgccttatgccggttggtatagtgatacattattcttaaacggtaatttaaatattggttattacactgtcgatagtgagagggatattggtggtaatacgggatggcaaggaaataccaaagcaaaaggtgactactctggtgtgcaattaggctatcagattaacgctggcacctatttggattttgattttatccatattaaaccgatgctaacttaccaatatcaatggctcaatattgattcttgggaagaaacaggctctacattatctatgcgtacttatggccaacgctacgcagttaatcaattaggtggctctgttgctttatggaatgactaccaaacctcttatggcaaattaaccccttctcttaaccttcgttatatcaaagatattgcaggtaataacgatattaatcaacgccacagccttacctattttaatactggaggaagcaccttcgatattaaaggaaataccgttggtggtgacatcattagtgctgaattaggtgcaaaccttgatattacccaatcgttaaatttaggtacaacaatgggatatcagcgttatgacaaattcaatgaagggcgtatcggctttactgttagccagcgtttctaaggagaaaatataatgccgatatttcgttttactgcgcttgcaatgacattggggttattatcaaccccctatcatgttattgctgctaccagcaatcctgcatttgatcccaatcatcttatgcaatcagaaatctatcattttgcacaaagtgatccattagctgatttttcatcagataaaaattcaacactaactttatctgataaacgtagcattatgggaaaccaatcccttttatggcaatggaaaggtggcagtagttttactttacataaaaagcttatagttcccacagataaagaagcctctaaagcatggggacgcgcttctacacctgttttatcattttggctttacaacgaaaaacctattgatggttatctcactgttgatttaggggaaaagctcaatgccaccagcgaagcccaagctggctttaaagtaaaactaaatttcactggctggcgtgctattggtatctctttaaataacgatcttgaaaatcgtgagatgactttaaatgcaacaaatacatcatccgatggtactcaagatagtattggtcgctctttaggtgcgaatgttgacagcattcgttttaaagccccttctaatatcagtcagggtgaaatttatatcgaccgtattatgttttctattgatgacgcccgttaccaatggtctgattatcaaataaaaacacgattatcagagccggaaattgaatttcacaccgtacaacctcaattacctgtaacaccagaaaatttagctgcgatagatcttattcgccaacgtcttatcaatgaatttgttggtggtgaaaaagagacgaatcttgctttagaagagaatatcagcaagctaaaaacggattttgaggcactgaatattcgccctctttcggatggaggaatgcaaggtcgacatcttatcaccgataaacaaactatcatctatcagccagaacagcttaattctcaagacaagcaactttttgataattacgtcattcttggtaactacaccacattaatgtttaatattagccgtgcttatgtgctcgaaaaagatccaacacaaaaagaacagctaaaacagatgtacctcttgatgaccaagcatctattagatcaaggatttgtcaaaggtagtgccctagtaaccactcaccactggggatatagttcacgttggtggtatatctctacattattaatggctgatgcactaaaagaagctaatctacagacagaagtctatgattctctactttggtattcacgagaatttaaaagtagttttgatatgaaagttggcgcaaatagctctgatttagactattttaataccttatctcgtcaacatttagcgctattattacttgaacccgatgatcaaaaacgtattaacttagtcaattcttttagtcattatatcactggtgccttaactcaagtaccaccggggagtaaagacggtttgcgtcctgatggtacggcatggcgacatgaaggtaattatcccggctactctttcccagcatttaaaaatgcctcacagctgatttatttattacgagaaacaccttttgctgtaggtgaaagtggctggaataacctaaaaaaggcaatgatttcagcatggatctatagtaatcctgaagttggcttacctttagcgggaagacacccctttaactcaccttccctacaatctatagcacaaggttactattggctcgcgatgtctgcccaaccagcgccagataaacagttagcatctatttatttagcaattagtggtaaatcgcgaaatgaatctcccactatttttggtgaagagataacgccagcgtcccttcctcaagggttctatgcctttaacggtggtgcctttggtattcaccgttggcaagacaaaatggtgacattaaaagcctataataccaatgtatggtcatctgaaatttacaataaagataaccgttatggccgttatcaaagtcatggtgttgctcaaatcgttcgcaatggctctcaactttcacaaggctatcagcaagaaggctgggattggaatagaatgcctggcgccacaaccattcatcttccgcttaaagaacttgatagccctaacccacacaccttgatgcaacgaggtgagcgaggatttagcggcacatcagcccttgaaggaaaatatggcatgatggcgtttgatcttctttatcccgctaatcttgcgcgttttgatgctaactttaccgctaaaaaaaccgtcttagcggcggataaccatttaatttttgtcggtagcaatattaatagcagcgataaagatcaccctgtggaaacaacgttattccaacatgctattacgcctgagttaaacactatttggattaatggccaaaaaatagaaggttttccttatcaaactacgctaaaacaaggagattggataatcgatagtaatggtaacggttatttaattactcaagcagaaaaagtgaatgtcagccgccaacaccagacttcggctgaaaataaaaatcgtcaacccacgcaaggaaattttagctccgcatggatcgaccacggtattcaacccaaagatcatagttatgagtacatggttttcttagatgcaacaccggaaaaaatggcgcaattagccgagaaattccgtgctaacaatgggttataccaagttattcgtaaagataaagatgtacatattatttacgataaactcagtcaaataacaggttatgcattttatcaaccagcagtcattgacgataaatggatcaaaaaagtcgataagccgtccatcgttatgacacatcaggaaggaaatatactgacggtgagtgctgtaacacctgatttaaatatgactcgccaaaaagcggcaacccccgtcaccattaatgtgacagtgaaagggaaatggcaacccacagctcaagacagtgaggtaaaatataacgtttctggggataataccgaacttattttcaccagttactttggcattccacaagaaattaaactctctcctctctcttgattaaacctttaaaggagcgcattcgcgttccttttttattttgcaggaaatctgattatgctaataaaaaattctttagcttatgcgattacactaagtttctgcttatccttacccgcacaagcattaccttctctttctcatgaaccttttggcgatctttatctttttgaagatgaaatgccaaataccttgagcacctcaaatgaccatcagctatcactaagtaaagagcatgctaaagatggcgtacagtcactcaaatggcagtatcaaccccaatcaacattaacacttaataatgaagttaattatcaagatgataaaaatacagcaacaccactcacttttatgatgtggatttacaatgaaaaaccacagtcaacgccccttacattacaatttaaacaaaataatcaagtagcattaagttttaaaacggaactgaatttcacaggttggcgaggtattgcagttccttttcgtgatatgaaaggctcagcaacaggcaaattagataaattagtcattactgcaccagatcaagcaggtacgcttttttttgatcaaataattatgagcgtacctttagataatcgttggcctattcctgactatcaaattccatatgttaataatgcagtaaatacaatggtgagtaaaaattggagtgcattattgatgtacgatcaaatgttcacagcgcattatcctacattaaattttgcgactgagtttcgcgatgatcagcctgaagtggcatctatttatcaacgttttgaatactatcaaggtgtcagtcgtgataaaaaaatcaccgctgaaatgatcgacaaaaatttagcattatggaaaaaattagccttagaacaacatgctgatggctcaataaccgcaaaagcccttgatcatcctaatcgccagaattttatcaaagtcgagggggtctttagtgaagaaacccaaaaagcattacttgatgccaacatgctaagagatgtaggcaaaacgcttcttcaaacagcgatttacttgcgtagtcactccttatcagcaatcgatagaaaaaaattagaaacgctctatttattaggcactcgttacgttcttgaacaaggtttcacacgggggagtggttaccaaattattactcacgtaggttatcaaacaagagagctttttgatgcatggtttattggtcgccatattctagcaaaacataatctgttagcaccgacacaacaagccatgatgtggtataacgcaacagggcgcatatttgaaaaagataatgaaatcgttgatgcaaatgtcgatattctcaatacccaattacagtggatgataaaaagtttattgatgttgccagattatcaacagcgccaacaagccttagcacaattgcaaagttggctaaacaaaaccattcttagttctaaaggtgtcgctggtggctttaaatctgatggctctatttttcaccattcacaacattatccagcttatgccaaagatgcatttggtggcttagcgcctagtgtttatgccttaagtcattccccttttcgtctttcatcaccagcacatgcacgcttaaaagatgtattattaaaaatgcgtatctataccaaagaaacacaaattcctctggtattaagtggcagacatcctacggggttacataaaataagtattgatcccttcaaatggatggctcttgcaggtacgcccgatggtaaacaagagctagatactacattagcagccgcttatgcaaaattagcaaacaaagatagctttgaaggtattaaagcagaaaatgaaccggtaggtgcatgggcaatgaattatgcttcaatggcaatccagcgtagagcatcaataacagcgccacagcaaagctggcttgctatcgctcgtggttttagtcgttatttagtgggtaatgaaagttatgagaataacaaccgttatggtcgttacttgcaatatgggcaacttgaaattattcctgcggatttaactaaatctggttttagtcatgcaggttgggattggaatcgatatccaggaacgactacgatccaccttccttatgatgaactagaagcaaaactaagccaattgccaagtgcaggcatagaagaaatgttgctttcaacacaacgttattctggtgccaatacactaaataataacagtatgtttgccatgaaattacatggtcacagtaaatatcaacaacaaagtctaagagcgaataaatcctatttcttatttgataatagagtgatcgcattaggctctggtattgaaaataacgataaacaacatacaacagaaacgacactgttccagtttgctgttcctaagttacaatcaattataattaatggtaaaaaagtgaaccaactcggtactcaattaaccttaaataatgccgatacattaattgatccggcgggtaacttgtataaattagctaaagggcaaacggtagaatttagttatcaaaaacaatactctgttgatgacagaaattcacagcaaacagaacaattgtttgcaacagccgttatctctcacggtaaagcccctaaaaatgcaaattatgaatatgcaatagccatagaagcacaagataataaagcgcctgaatacaccgtattgcagcataataatcaacttcatgcagtaaaagataaaatcacgcaagaagagggatatgctttttttaatgccaccgaagtcaattcatctcaagctttattattatcaagtgattcccccactatggtaatggtaaaaaaacaaaaacaacaattaacgctaagtattgttaatcctgatttaaatttatatcagggtattgaagctgaccaaattgataataagggtaaccaggttgaagtgagtgtttattctcgccaatggcttacagccgatcctcaaccaataagtagtacagttactgtaaaagggatttggaaattagccacaccacaattaggtgttaatattagatatcaaaataataatacgctaattacaacaacgactatacaagcaataccaataacagtttatttaattaagtaaaagtcgtaacttttaaattaaagagtctcgatataaaacatcgagactctttttatttataaatcaatttagcgaatcaattattttatttaaataataataaatcatatcttcatttattattgataataaatctgttgtctcattttaataatttgttatgctctgcgccgggtgcttggatcaatctggttcaagcattatgccaataccagaaagagaaaagccccggaaaatatacagtatattaaccgaggcggactcaaacatagacaatttgattctgcctccattcttatcggagcgcaagaggaaatgaaaaaatattctttaatcgggctaataatggtcgccatgataacaccgagtaatctattattagagcagaagcctgttgtttattccccgctaataaggagtatttaatggttcaggttaatacttcactaattgagtattaatcttgtgggggagttatcccccacaatttcctaattcgattgttgtgttttaatctaagcaccctaatttataagaagaggtaacaattttatgttacctcttcttttatttataactcaacttaacgaatcaattactttatttaaataataaataatcatatcttcatttattattgataataaatctgttgtctcattttaataatttgttatgctctgcgccgggtgcttggatcaatctggttcaagcattgtgccaataccagaaagagaaaagccccggaaaatatactgtatattaaccgaggcggactcaaaaacacacagtttgattctgcctccatttttatcggaacgcaagaggaaatgaaaaagtcgacttttattttagccaatatattagttagaaacaaattaaaaggaataggtattaaattaccaattattaatataaagagctaattatttaacgtcatttttaatacttcactacccgctaataagtatgctccagcgccataatccatattatgctcaaactttacctctcgcggattaaatgccggaagttgtacccaaccaatcatgccattatcatgaatacaggattgtaatgctgaccacgctctatgtaatgcgggaaaatattcttctttatttaattcaccctgatttattccccatgcaagtccataacaaaaaagcgccgtagctgaactttcaggtgcagggaaattatcaggatctaataaactggtgcgccaaaaaccatcttcatgttggtaatctaggatagaacgcgctaattgtttaaacagtgttatataacgatcgcgctcatgataatcatcaggcatatattgaagaatgcgaggaatagaagccaaaacccaaccaataccgcgactccaaaatactttttcaccattagcttcacgcatttcatttccctgaccatcaggaatatagcggtgatcgcggaaaataagtccagtttcagcatcacgtaaatgttcaatagcatcccaataagcggtatgcatataatccaaataacgtcgttcgctaataatttcagccaaagcagcaaaaccaggaggtgccataaaaagagcatcgcaccaccaccagtcttcacgccctggttttggatcatttagcatgatatcaaacgctttaatcgtcggttcaagaatttcagattgttcaaacaaaggacttatcgccaaataagcttgagcgcaaacatgatcatccgcaaaacgtgcattaggacctgttctaaatccagtatgtaaggtgtaatttaacacaccattaaggtactctttatcttgtgtcgcttgccatgccgcacttacacaggtccataaaacaccgcgttcccaatctgtatctttaataaaacgagttttaccactacggcgacgaacactacgaacttgatgagcagattgataacgataaacccgtttcatattttgtaacacgagatctctttgtaaagcctctgtattagcgtgttccatcctagttctccataagattatcgagctaaccaaccaccatcaaccgcaatggtatatccattgatataatcactagctttagaggctaaaaatatggcaggacctgcgacatcttcaggtgttccccaacgccccgcaggaatacgctctaaaatagcagcattacgcgcttcatcagcacgaagtgcagcggtgttatcggttgccatatagccaggagcaattgcatttacattaatattatattgtgataattccgtcgctaatgctcgtgttaatcccattaccgcggatttacttgccgtataagaaggaactcggatacctccttgataagaaagcattgacgcgatgttgattatcttgccaccttcgccttgtttgacaaactggcgagccactttttgcgataagaaaaacagtgtcttttggttaatattaatcacatcatcccaatctttttcactaaattgcaaaagatcttcacggcgaataataccggcattattcactaaaatatcaatacgtcccatcaccttaacagcctcatccactaaagcatctaatccatcttgttggattaaattttgcgtgatgtaatgaaaacgacggcctaacgcttcgactttttgacgcgtttcaggagcatcttgaatacccacgccaacaatatccgcaccggcttgtgctaaacctattgccattccttgccctaagcctgtattacacccagtaacaatggcaactttgcctgttaaatcaaataaattcatgattaaaacctctagaagtgtggcaataattgccacacttttttttgtaggaataaagaataaaatgtaattaattatctgttatttcagatctttcatagcaacatgatccatatcgtggaatacctggttttcacccaccattccccaaataaaggtataagatgcgcttcctacgccagaatgaattgaccaactaggactaatgacagcttgttcgttgcgtaccactaaatgacgagtttcagttggctctcccatataatggaaaaccacattgtcatctttcatatcgaaataaagatatacttccatacgacgttcatgagtatgacatggcattgtgttccacaagctacccggctcaagcactgtcatccccatggataattgacatgttggtaacactgaaggatgtaaaaacttataaatcgtacgaacgttacaattttctgcattacctaacttttcaggtgaggcctgctgttgagtaattttgcgagtaggataagtgtgatgtgctggtgcacagttaatataaaaacgcgccggtgtctctacagaatcactggtgaattcaacagatttggctcccataccaatataaatggcttcacgagggccaatttcaaatacctcaccgtctataataactttacccgcaccaccaatattaatagcccctaattcacgtctttctaagaagaaatcaacaccaagtgctttacccgccattaatgctaaaggttgagttgttgggacaactcccccaacaataatccgatctatatggctataagtgagattcatttccccttcacagaataggttctcaatcaggaactctttacgaagtccttctgtatcaagccttttagcatgttcactatgaattggctgacgaatttccattataaatacctcatttttactgatgggagcataacgaaaaggttatgcattatccccggatacagagtaaatatgatttcctctgatgaatgtatcggtaagatgaaaacactcatccaccacggcaaagctggcttgttgacctgctttgatataacccaatttatcccctatgccgagatattcagcggggatcgccgatgccatttgaactgcttcccactcaggaatatgtgcaagttgcaccatgtttcttaacgcactatcaagactgcaagtgctaccagctagcgacccatcggcagtttttgcctgtccattggtgacggtgaccgtttgagcacctaatgtgtaatcaccatcagctaaacctcccgctcgcatacaatctgtaattagggcaatctgttgatatcctttcatgcgatatgccagttgcatcattacagggtgaacatggataccatcagcaataagttcagctaatacactgtgatataacactgcaccacaacatcccggctcacgatgatgaagcccggtcatgccgttatacagatgcacaccacaatcagcaccgtgtgaaaaagctcgtgaagcttgttcataagttgctgctgtatgtgccacacttggtttaattcctcggctgaccaaccaatcaatcgcattcatcgcaccttcagcttcaggtgcaacagcaacacgcaatagcgatcccccagcactgtcgagtaatgtttctaattcacagatggtcggcgctttgagatatttcacagggtgtgaaccacgatggcgttctgtaaaataagggccttctaaaaagctaccgagtaacaacgcacctgttgcttgaggttttgatacaaactcacggacttgtaatagcgcatgacggatatcctccatcggtgctgtgacagtcgttgcaacccaagccacaacccctgttttaaccagcgcatcggctatagtttgtagtccttgttgcgttgcatccatcacatcagccccttcacgaccatgaatatggatatccacaaaaccgggtaataatgattttccttttaagcgaataactgggcaatctgttggtgcttgtgtggtgattgattcaatattttcaccattaacatggacatagcagagataacggataccttcaggtgtaaaggttctatctgctaaaatggcatatcgctgattcataagccgtcttcttcttcaacatcatgactatctatttgtgccaattgctctcgaatatcttgaatgctgtcttgaccaatttcgcgtagcgtttgcaccaattccgtcgttgaacacccttcccgttcaaatgccgcatttacaatcatgggtaaattaaccccagctaacacctcaacagagggattttgcatcatgattgccattgcgcgattacagggggtaccgccaggtaaatctgttaagaagagatattgctggcatgacatagcgttaatcgcttcacgcattttttgttcaagctcatccggagaaattgactcaataaaatcaataaacgcgatattttcttgctcaccagcaatcgcctttacagcggatgccatacctgtagcaaaattaagatgtcctgagacaataagacctatcatgagtaactccttgcgagtagcagatagctctactacccgtttgtagcaagttaataatgtatttcgattaacagtgtcgacaattagggcatctcttttttataagaatcctaatacatgcccaataacgccaaatgctagggttgaaaaaatcaataccggtggcttaccccaaaaaccggtacttttcaccattttgtacattaagaaaactaagcacagtggcagtaaattcggcataattttgtcgaagagggctgtttgtaattcaacgacttttccgccaagttccagcgaggcggtggtttgcactttgataaaggtcgccgagagcgcaccaataacaaagatccccataatatttgccgctttcgctaatttttcagtggcatcgctcatattgaccattgccgcagtacctgcgcgatagcccataaacatcagtccgaaatacactaaaaaatgcacaatttgatacaagaagaagaaaacgaaaggtcctgcaatcgagccttccattgcaatagaagcacctaatgctaaggtcaaaggcattaaggtcatatggtcgatagcatcgccaatacccccagtcggccccattcctgccactttcatcacattaacagtcgatggcttttctttgttctcttccattgccaccgccgttcctaataaaaaggtaaacagctttggactggcattaaaaaattgcagatggtttttcaacgatgttgcataatcgcgtttattattgccgtgaattttcttcaatgctggaataattgagaaagcaaatccaccaccttgcatacgttcaaagttgaagttaccttccataaataagccacggaatgcacacttccaaagtatgcctttagtaataacttttctgacagcagtatcttgatactcatcaatgccatcaatcaaagaacctgtttctggtttatcctgcgttttcaatgcggtgctgttatcagataccatcttcgaaatcctcattctgctgacttgaatttttattgttaccactaaagaagaagtagagtgcggcggctgatgcgcctaaaatagcgacggccataattgggagtttgagataggttgtcatcacgaaaccaataaagaacacaccggccacttcttttgaccacataatttttagaagcattgcaaaaccaattgcgggtaccattttcgccccaatacctaatccttctaataagacttttggcgtgttctcatcaatccattgagcagcatgttcaccaaaataaacagtaacaaaagcgactaaagcataaaggagtgaacggacaataagtgtaataatcagcaagcgagagatccccgcaccgtcagccttttctgcatatcgatccgctttacccatggtaaatgcagtcatagcaaagaaaccaatcaccaacatctgcattaaaacagcaataggcatacctattcccattgcaacttccggtgattgttttgtcattaccgcaaaagcaactgctgcaatggtgcctaatgtcacatctggtggctgagctccggcattaggtacaagccctaaccatgcaagttctaaggtagcacctgcaattaatcctacttgcatatctcccataatcagaccgacaacgggccctgtaattaatggtcgatggatatttaatgccacgtcgtacttatcgataccgcaaaagaaggcccataaagccactaaagaagcttcaaaaatcataaattatcctcaaacctgcctatagcaggttttcttgatcaggaaataatcaggctgatgcgagtgttagtacatcaacaggagtttgatctggtgtgttttggactgtgcaagtaacccctttttcgataagacgcttaaaagcactaagatctttttcatcgatagagactgttttcgcaatttgacgtttaccttcatgaaaatgcatattgccaacattacaatgagtaataggcacgccaccttcaactaaacgggctacatcagttgggttattacacagaacaaaaattttctgacgaggagatgctttgctaataacatcaatagttttttgaatagagaaaaagcgaaccgcatattcgccgccagcagatgctttcattcccgcctgcataaatgcagcattgggaccttcagcagcatcatcattagcgactaaaattaggtttgcttccgtatgtttaccccatgtaatgcggatttgtccatgaagtaaacgttcatcaatgcgggtccagacaatattaggtgtgttcataactagctctcttattatattttattaatttaaagcagactgtgtgtcttctgttttaagtgagaacggataaattgtgacgccttgtacaactcgattgatttctccggttggagatggattatcaggcgtattccctagtgcaatagaactgtgaaatgcaaatgattgcgccaacatcaaataagggaacaatagcgccacatctgaacagttctctaacgctggaatataaacaaaactctctggtgaaaaagttttatcatttcgtgcggtgatcgcgatcaccttgcctgatgcattatcgtgaataacctctcgtaataaatctgtctcgtattgacgtgtataaggatcattagagaaaaacatcaccacaagggtttctttatttacgatggatttaggcccgtgtcgaaagcctaatggggtatcaaaattggctacgactttacccgccgtcagctctaacatttttaatgcggcttcttgtgctagcccttgtaatcctccgctaccaagataaataacgcgtttgaattttcctgcgtattgatggcggataattttatttgctttgtcaaattgcgctttgtaatcactaaaaaacggcgcaatagcatcagtaaatacactatcgcctaaaaagatagtgaccgccgccatcatcattgaagaaaaacttgatgtcattgctaatgagcgatcgtttgactcttccggcattaataacgccaatgccttatgactattttggcaatattgataaagctggccctgagggttacaggttaaaactaagtggtaacattgcgataagcacttctttgcaatatctaacgcagccacactttcggggctattccctgaacgagcaaaagaaatcagtaatgtagggatatcttcggctaaatattcttgaggatcagcgactaaatccgttgtggcaatagcatcaacacgacgttttatagctcccgtcaaaataggtgctaacgctctaccggcaaacgcggatgttccagctcccgtaagaattattctgctatttgatgcctccaatgctttttctaaaaaagactcaatatcagcacgtttttctcgaattgatagccatgtttttttccagcactctggttgctggtcaatttctttcgctgtccaaaatgcgtttaactgctcaagttcagcggtttgatagcttaaatattccatggtttccctcaattaatggacattgcacgcatcggcataaaccgacaacacatcacgaattttcgcaataacaaatgactcaggcgtacccgcaattttcccctctctaaactgggtaaattgataaggcaaatattggctaagtaagggaagtggaataggcttaacagataaattatccattaatgtgtcaatagcagtattaatctcggcatcaggccaataataacgaatacgatcactaaaactataaacacgagcaaaggcgagttgacgttcatcaccgtgataatatttttgccaaaaattaggctcacggcacatcaattgttccattttttcacgtaatcgagagcacttttcaagaggaaataatgtttcttcaatggcgcaaagagcatataaaccttcacgcatagcaaatgttagcgccggcccaacttttaaaatagcaaagtgatcatggacgagttgctgataagcttgattggtttgataatctgtagagtgagcttcaaaaaccagatgagaatagtcatttactacttggcttaacgcttgtgctttttcagattgataatcaataataccggtatgatcaaattcaaccccaggctgtacaactaaacctataacacgagtccaacactctcccacaccagcgtcataaaatgcttggcgatggcacgctaatgttttacgggcagcatcaggtgaagtcacctcaacggtatcaagctcttcagcagcgccaccaggaacggggacttctgtgccaacaacataaacaatatcactaaaaccaaatgtctttttggcggtattttctgcaataacagcaagacgagctgcacgcgatgccacgatttcatctgttaaaggaataggatcatctgcacaagacatactgcaatcaagatggatttttttaaatcccgcggcaacataatgtgcaataagtacatccgcatttgccatcgcttcttcagcattaagatgctgccagcgattaggccctaaatggtcaccaccaaggataagcttttcgacaggaaaaccgacattttccgctttctcaataacatattggtagaaatcagcgggagtcatacctgtataaccaccaaactgatcaacctgattagaggtggcttcaatcagcagaaaggaatcatcgtccagcgcttgtaataaagcagcttctattactaaagggtgggcagaacaaacagaataaataccattctgtttgcctgatttatgttgctgaacaatcttttctaaaggatgcatgtaaatactaactccataatcaacaccggcggtgttgctaatggagttagcaaattacgctgtcttatcgtccacgatgataacgtcgattttatgatctttcagttcctgaacatactcatcaggaatacccgaatccgtcactaacacatcaatatcaccaaactctctgatcatatgacagctgcgtttaccgaatttcgtagaatctgcaaccgcaataatcgtttctgagatatcacacattaaacggttaagactggcttcctgttcattgtgagtagtgataccaacacgtaaatcaaatccgtcaacaccaagaaaaaccttatcgaaacggtaatttcttagactattttcagcttgtgagccagaaaaagacaatgcactttttcgcaatacaccacctgtcattaaaacttcaacacctgtggtatttgctaactccattgcgacatccagaccgttagtcatgacgactacattttcgcgcgactttaaatgtgtcgcgatttcgcgtgtagttgtccccgagtcaagaatgacggtgtctccatcctttatcagcgttgcggcagctttcccgattaatgttttaatgcccgcattttgtccacgtttttcatggatactcagttcagcaataaagcctgtattaggaattgctgcgccatgagagcgaacgatatagccatttttctcaagaaaacttagatcgctgcggatagtgacacttgagactttaaataattcagcgagatcttcgactctggttttgccctgttggttaaccatatcgaggatttccatacgcctctcaactgccgctttcactttcgtctccttacgaaaccaaaagatttactttcgattgatttcgaatgtagtttactacgccaaatttaaccgacaacgcaaaaaaacaaaacttttgatctctttcacaaagtttcgatttcactgtcgatttcttacgattattttcgtgtcatgtcaatgatagccttgagggcatcagtttccaataaataaaatgatataaggtaatgtcactcttatgattacaccatatatagctatataaaatgccatgaaatagaattaatagcgaaatatttcacaaaaatcagattaaaaattcaaaatgattatttattttcgaaaaataaaagagtcatatcgctcaaataatcaaaagaacacgaaattatcgccatgagaacatcgttaaattgaaaattattgtgttatatacttatcaataaactttcatttactttcgatattctatatttgtgattttaatctcttttgttttgtaaaaatttacgtaatgtaacaggataaaaaataaactcaggaaataaataatggcatcaaatcaacctgctttatttcatatgatggcaaagccgacaagctaccactgtaatattaaatgtgaatattgcttttatctggaaaaagaaaatatttttcaagatgagacaaaagaaacaggccatacagtgatgcctgatggtgtacttcgtcgttatattaaagactatattcagtcacacagtggcgatcaggttgattttgcttggcaaggtggtgaaccaacgctggcaggattagctttctttgaaaaagtggtcaaataccaaaagcaatttgctaacggcaagacaattaccaatagtgtacaaaccaatgcgattgccattaatcgccaatgggcacaattctttgctgataaccactttctattaggcgtttcaattgatggcattgaagccgttcacgataaatatcgtatttcagtcaatggtagcccaacatttgaacgcgtaaaacgcgccatcaatttactaaatgagtatggtgttgaatttaatacattaaccgttgtaaatgatcaaaactggaataaaggaaaagagacttatcaagctttaaaaaatttaggttcaactttttttcaatttattcccatagtcgaagtggatagacgtttcccacacactcatggcggacattatgctcccggtcctaacgcacaattagcggctttctctgttcccgctgaaggttacggaaaatttatgaccgatatattcaatgaatggatacgccaaggtgatgtaggaaaaatatacattcgcttatttgatagcttattagggacatggatgggatatcctgcatcaacatgtattcaatctaaaacttgtggtcaagcattaattattgaagccaatggtgatgtttactcttgtgatcactatgtttatcccgctaataatttaggcaacatacaactaacaagtcttgcacagctcgcaacatcaaaaacacagcaacgctttggtcaaaataaatacgataaacaaaccaacctttgcaaacagtgtgaagtgcaaagcttatgttatggcggttgtcctaaacatcgcattattgcgatagaaggcgaaaaatatcgccacaattatctatgtcactcttataaaaaaatattttatcacacggcaatcggcatgcaattaatgcgtcaagcgatagctcgtggaggccttgccagtgatgcacttggggcgatgcaaaaaaactatctcaagtgactcttattttatttcattttatttattttggagacaatctgtgaccttaccttttgttaaaaaaaacatactcgcggggatcattgccacgtcatgtttaagccttccaatatcagcccatgctggtggcacacctgaaaaaccgaatgtactgttaatcgtaatggatgatttaggcacaggacaacttgattttgtactggataccttagatgtagatgcgttagctcagcgaccaacacctcctcgttataaaggtgatatcaataaaatgatagaagccgcacgtattgcgatgcctaatgtcagtgatatggcagaaaacggtgcaaaaatgactaatgcatttgtagctcatcccgtttgtggcccttctcgtgcaggtatctttacaggacgctcgcccgccagttttggtacttacagcaatgatgatgccattttaggtataccccaagatatcaaattgttaccttcacttttccaagaaaatggctatgccactgccagcattggtaaatggcataatgcaaaagttatccgtaaaccgaaaataaatgaaaataaacaaacccgtgattatcacgacaatatgatctcaacccctgaagcgggttatgcgcctcatgagcggggctttgattacgcctttagttattatgcatcaggtgttgccttatggaattcgcctgcattttggcgtaatggtgtcaatgttcctgctccgggttacaccacccatctattaacggatgaaacactaaaatttattgatgaacataaagataaacctttttttatcaatctttcttatagcgttccacacataccgttagagcaagcatctcctgctaagtatatggataaatttgatacagggaatgtggaggcagataaatattttgccgccttaaatgcagcagatgaaggtattggacaaatcattgcgaaattaaaagaaaatggtgagctagaaaatacattaatttttttcttatctgataatggtgcagttaatgaatcccccatgcccatgaatgccatggatagaggctttaagggccagatgtttaatggtggagttagagtaccttttattgcttatcaacccggaactattcccgcgggaacaaaaagcgatgcgatgatctccgcacttgatattttgccaaccgcgttacaagtcgctgatattcaaattcctgatagcctgcaagtagaaggtaaaaatattatgccattgcttaaaggtgaaacaacgcgttcgcctcatgcttatctgtattgggcaggccccggcactaagcattatagtgaagaaaaccaagagttttggcatggttatcatcaatggatcacctatcaacgtcaaacgcctccagtaaaccctaacttagagaaactgtctaaaggtgcttgggcagtgcgtgatggtgaatgggcgctctatttttatgatgatggtaaaaatcaaccacagctttttaacgataacaccgatcctggcgaatcaatcgatttggcaaaacaaaatccacaaaaagtggctgaactaaaaaatgcgtattaccagtggatcaaagataaacctaaacctgttatttgggggcaagatcactatcaaatactagtagattcagccaaaccttaaactcaacttccgttttgtttcgcaaggatgcgtcttttttctgagatacgaaaatggttattgaaattgcatctaaaccacggcctaaactgccttatgagcaccctgatgtaaaaatttatcaacgcttatttaaagaaaatataatccggcgattagtcagaaaatcggcttatcaccgtcatgataatgctattgctgatttttttaaggatgagacacactctcttttttcgctctgtgaaagacttactcagtatattacagaagcttttcatcactatcaggtttggggttattcccatgcctattaccccggtagtcctggccaacaaaccgtcagaaccgatgcgctagaaggggtcagtcgagtacttcctttacttgccgcatggacagtaaatagcaaaaaaagcacattactaggtttaaaccagcaaatttaccatttaccctcaatgataaaacaaagctttattcatggaacagatcctcttcataaaggctattggggaaaacttgaaaattacgatcaacgaatttgtgaggcatctgatctcgctcttactctttggatcagccgtgaatgggtttgggatacgttatcttcggagatcaaacagcaaataattaactggtttgaacaagttaatcactgcgaaattgttgataataactggcattttttcccactaaccgtccaatttgttattaaagcactgacaggtaaagataccattgcccattggcgttatgaaagattaaaagaattttatgtcggtgatggatggtttcgtgatggggcaaaaggtaattatgattactacaatgcgtgggggttttattattctctttattggctagcgcaaattgatccacaatttgatcatgattttattactcaatccctgaataattttaatcaacactacctttattttatcaccccaaaaggtattcctttttttggtcgtagtgcctgttatcgtcttgctgtttctgcgccattactcgcaggcgttgatttacaatgcccttttgtcaaagttggagaggctaaacgggcttttgaaagtagcttacgttattttatttctcaaggtgcactcaaaaatggcgctcccactcaagggctatttaatcatgatgctcgtttagttgataattacagtggtccagcaagctctttttggtcattacgggctgtcattatcgctctttattgtgctgatcgtattaatttatggcaagcaccatcacttcctttacctatcgaaaaaaatgactttcgtttcgaaatacccgctatccaagcatcaattatcggggtgaaagcaacacaagaagtcagtgttatttttcgagaggattatacacaacaacaatcacctttaactcgccgtttagaaaaacaaacgcgagtacaaaaaatcacagaaactgtaattggacaatcaagacgccctaaaaacaacctattacgcaaaggagtcaccagttacagttctaaaatgacacatttcttctgacttactttcatttgctttcggtgcgaagggaataaaaatgtgatttagatcttttacctttctatttctttcgtttattattaatcgtaattaaacgaaagatgagaggcaaacatgtatctggtttctactcgtaatatgctcaataaagcacagcatgaaaactatgctgtgcccgcttttaacattcataacttggaaactatccaagtggtaatggaaactgcggctgaaatggcatcacctgtgatcttagcaggcacacctagcacgtttgcttatgctggtagtgattatttaatttcgatttgccagcaagcggctgaacaatatcgcatcccagtagcactacatttagatcatcatgaaaatattcctgatatttgcaataaagtgatttcgggggtgcgatcagccatgatcgatgcttctcattttccttttgaagaaaacattcgcctggttaaagaggtcgtcaatttctgtcattattgggattgcaccgtagaagctgaattaggtcgtcttggtgggcaagaagacgatttaatcgttgatgcgaaagatgcgctatttaccgatcctgattcagcagtacaatttatcaaagccacgggaattgactcattagcagtggcgattggtacagcacatggtatgtataaacatgaaccacatcttgattttgatcgtctacatgccatccgccaaaaaacagagatccctttagtactacatggcgcgtcaggtattcctgatactgatgtacgtcattgtatcgacttaggtatttgcaaagttaacgtagcaaccgaacttaaaattgctttctctaacgcaattaagcagtactttttagataatcctgatgccagtgatcctcgccattatctagtgccaggtaaagcggcgatgaaagcggtggttgcagataaaattcgcgtctgtaaaagtgatgggaaactgtgaaaataaatagaactgtcgccattattggcgaatgtatgatagagctaagtggccaaccttttttgccacaacaacagcgttttgggggcgatacattaaatacagcactgtatttagcgcgcctcattcctacattacatccgcaatatataacaggtttaggcactgataattacagtgccttaatgcaaaaagcatgggaaaaagaggggatcaactgcaagtcagtgatcaccattcccgaaaaacttcccggtttatatgccattgaaattgatacttgtggtgagcgtagcttccattattggcgtagtgatgccgctgcacgttatattgcaacggacaaccgttttgcaacacatctagataccttgcccgacgatagtgttatctatcttagtggtatttcactggccattttaacgccgaaaggaaaagaagcgttaatcacgcaattaatccgccttaaacagcgagggatcaccttaattgtcgattcaaactatcggcctcgtttatgggatctaatacctcatgcgcaagagtggttcgaaaaactatatcgactcagtgatatcgctttagtcaccggagatgatgaacaagctctctggcaacaacccagccttactgagcaaaaaattgtcgaacgccttcatcaatggggcaataaaaacgtcattgttaaactaggagcaaaaggggctttctggtctgatggtgaaaataccggttatatctgccccaaaccgatacagcatgtcatagacactacggcagccggggattcttttaatgctggttttattgctgcatggctacaaaactaccctttgcctacatgttgtttatggggaaatacattagcaggattagttatccaacatcatggcgccattattccccataacatcactgattcattctattcactcatcaaggataaccatgagacagtcaattgttgatacactttcagtactgaaagtgatccccgtgatccaaattaatcgcgccgaagatgcaatttggctgggtgaaatactaacccaaaatcaattacctattgctgaaattacctttcgtactccagcagccgccaaagcaataaagctgatgagagaacactttcctgagcttattctttgtgcgggtaccgtattaacagcgcaacaagctgatatagcaaaagaagcgggtgcaagctttgttatttctcccggttataatccaaaaaccgtcgattattgccttcataatggcattgatattgtgcctggaataaataacccaagccaaattgaagttgctcttgagcggggtttaaccttgctaaaatttttcccagcagaagcttctggtggagtaaaaatgctaaaagcaatggcggcaccttactctcaagttcaatttatgcctactggaggaattagtctaaacaatgttagtgattacctcgctatcgggcaagttatcgcatgtggtggcagttggattgctactactgaggcaattgataatcaagacaaacagactattgctcgcaatattcaaaatatccattcattacttaagaataaaggataaacaaaatgaaacaggttgccgttttattggctgatggttttgaagaaggtgaagcggttgtttttattgatatcatgcgtcgccttgatattcatgtagatgtactttcttgcatggatacactggtgttaaacacctattttaacactaagatcagtgctgattacctattaaccgaaaaattcacacacagttatgacgcagtaatgatgccgggtggtcctaaaggtacagatcgtctatgtgcaaattcactcgtgattgattttattaaacgccatattgcacaagacaaatacatttgtgctctatgctcttccggtgcaaaagtattagcagcacatcatcttcttgaaggtcgttattacagcactggtgataaacttgctgataaatatgatgatggtcattatcttgaccaagatgttgttgttgatgggaaatttatcagtgccaaaggattaggtgttagctttgaatttgcctttacggtagctaaatatttgctcagtgataatgtagaaaaagtagattggcaagctaatcacatttactttaaacattggccgttgtcttaccttgactaaatattaaataactaagccctctttttaaaccgccgttaataacagtgcggtttattagagggctttcatttcttatcaaaaaaaagagttagaaacgatacagactaaatggtttggcatctaatacaggttttttgcctaataataaatctgctgtaatttctgctgatacagggctttctgtcattccccaacctgttgcagtattaataactagacctggatactctttaacatcagagataattgggttttcatctggtgcaatcgccatcgcaccactccactgatcaattaacgttgattctttaaatgctgggaactcttttttcagtttttccagtgaggcatttaattctggcagatcaggcagagcggtcatatcacgatatttttcaaatggcgactcttcattaagatcccaatgtgttgattgcataaaggaattaatcaactgctcatttaacgaaatatgtactgggaaatcaggtaaagccagcagaggtaaatatttatagccgtaagtaaatgattcttttactaccggagcaacaatgacacgaggagaagttgcatacgttccatccgcttgctcacggaagaaaattccgccgggtaaagcaacgtttccacctggcgcatttggtgctgcgctaattaattgctgtgattgataagcaggtaatgttggtacatcaacatttaggttctgcataaataaacgtgaccaaacaccaccggcgacaacaacacgagaggttttaattggtcctttttctgttacaacatcagaaataacaccagcttgcgtttctaaaccacgggctgcacagtttgtgaaaattttgatacccatttttttggcatattctgccatcacaaaagtcgcaacttcaggatcgaagcttcctgagtcttcttcgaaaccagcaattttccaatcagtggtagcgccacgtaaacgctgttttaactcagcgccttcaatcatttttgttctaaatggaatgtctgagccaacatctttgcttttagcatcaatccattttcttacgttttctaaatcttcttcatctaaaggaacttctacacgaccttgtgtacgataagtggtatcaataccaactttagcgttcatttcacgccagcggtgcttcccgaggtgatgtaataagaaggtttcatctggcattttatagctaatagcttgaccatagaatcgagatgattgttcgccggcaatatttcctttttcaacgattgtgacagataagccacgctcagcaaggttaatcgcggtcatgatacctaaaatacccgcaccaattacaacaacatcatcttgtttcggtaatggaccgccagttccctcaacaaaaccatgtctcggcgtaccaggaacaaaacgcccttctcgcgttaacataggtgttaaaatcccagcgcctgcagcaacagcaaccactgtgccaccaagaataaattttcttctacttattgccatttcgaaacaattcctttcatgcagtgaataattatcattatataatcacggcattttattctatttgtaacgcaatagtaaactagttgtgattatttttttggtgaatagtatatgaatgagctaatatattcaaaatgtaagcaattgattcaaggtattaatatttaaggcattattggattaaaataatttttttaataaaaaatttaatattttcattaggtttatataaatcaagttcataataactgatagaaaaataaccattgatacaaaatttttcactaaaaaagctattatcatggcgttttttatcatagcggtgttaatataatttcatctattaacgcactttttgatcaaagaatattcaggcagataaataacgttggaataatgttaatcttttcctctattttagagatgcgtattgatgcttatttcaatagtgtgttgttctttcagactagatatttatataattcaaattgcttaaaaaataacgccctacccatcatcaaaattaattatctattaagtactgctatcccattatttaacaactataaatcaatcggttagcctcaaacacggtgagtaaatgcaaaatcaagtcgcacaatcaatgaaaaacagtatcaaggtatacttggtaaactcatttactcgtgatcattgcggtggcaaccctgccggagtcgtcctcaatcctcccaagctaacgacagaacaaaaaatcgccattgctcaacaagttggattttctgaaacggcatttgtctattcgggtgatgacactgattttaaagtagatttttttactgctgaaggagaagttgatttttgtgggcatgcaacattagcggtttttttcactctgtcatcgcttaagttactcaaacctggcgattatagccaaaaaaccaaggcaggaattttaaccgttaccattaatcacgataatattgtgatggaacaaacgcttcctattacccgtaaggggccttgtgttaacgatgtcgcaaaggcgctgggcattctacctgaagtgatagaaaagacagatttaccaatagagattgtctcaacaggattaaacgatatttttgttcccgtacaatttggctatttagatgccttacagcctgactatcaagctatcgctgctttaagccataaatttgatactatcggctttcatgtctttgaacttagtcatgatcaaaatattactgcccactgccgaaactttgcaccacgctatggcattaacgaagaatcagccacaggtagctcgagcggtgctttagggtgttatcttgttcatcaccttttgccaaacaaaaggcaatttttgttcgaacaaggtagagcaatgcaatgctcttctttaattgacgtatttattgattcgacagcaaaaaacgtcactcgcgttcaagttggtggaaaagcgacattgattggtacaaaaataattgagatctaaaaatactatatttaataagtggcgttgaaccgatgattatttatcatttggcaacgccactattacgaatcaaaacaagttgatagagcaaaacgtcacaatttaacaggtgatagtcactgtgttgctcttaattaaacagtgaaagccgaagcactaaagcaacgagtgtaacaatgagcacagggatagtcatgatgatccctgttttgaaataatatccccatgtgatcgtcatatttttttgtgataaaacatgtagccacaataatgttgccaagctacctattggtgtaatttttggccccaaatcagcaccaatcacattggcataaatcatcgcttgttgaattacccctgtcgcgtcacttccttctatggatagagcaccaattaataccgttggcatattattcattattgatgataaaaaggcggtaataaatcccgtaccaattgttgctatccataaccctttatcagcaaggtaattaagtatttcagaaagataattagttaatcctgcatttcttaaaccataaacaaccaagtacatacctaaagagaaaataacgatttgccacggtgcgccacgcaacacttttttagtattaatcgtacggcctttggctgcaattacccaaagaattaaagcgccaattgccgctattgcactaacaggaatgcctaatggctctaaaataaaaaaaccaatgagcaataacaacaatacaagccaacctgctttaaacgtagtcatatccttaatagctaaagctggctcactcagctttttaacatcatattggttaggaatatctttacggaaaaaccaatgtagcatcacaagcgttgcaacaattcccgcaatatcgactggcaccataattgatgcatattcagtaaatccaatattaaagaagtccgcagaaacgatattcacgaggttcgaaacaatcagcggcaagctcgctgtgtctgcgataaacccagctgccataacaaaggctaatgtcgtacctttgttgaaaccaagtgcaagtaacatcgcaatcacaataggtgttagtatcaatgctgcaccatcattagcaaataaagcagcaaccattgcaccaagtagcacgatataactgaatagtaatcttcctttcccaccaccccacttggcaacatgtaatgccgcccattcaaaaaagccactttcatctaaaagtaggctaataataattactgcaacaaatgtcgctgtggcattccacacaatgttccaaacagtcggaatatcttgaaaactgatcacaccaaaaaggagtgccaatatagcgccggccgttgcactccaaccaatacccaaccctttcggctgccagataaccaaggtgatcgttaaaacaaaaattaatgcagcaacaaacataacaacctcgtttaaaaggtgcattcacacacacctaatcatatatgttttttcgaatatatttagttaaattttttacacagaacaacgatgaccagactcttttttctctaggatcttgagtaaatctgcaactctatttttctctgtggtataagttatatcaatgatacttttcacccacggcagtaatacaggagataatcgataatgaacccatttgccttgcttcgaatcgagcaaaagacccgactctctcagcatagctaagtgtcgagatgtcttgggttgcgataaatttaacgcagtatagatatcacaaacacatagctcaccagatacttttaaaagcaatacgatgtctagtctggtttgatcacctaaaattttaaacagttgtaatggtttcatgtatccccctttacgatctttagcttaaaaatacccccatcaaacacatacgtcaaatcatatatgagttatacattattgtggcataatctcgctatctattatgcctataataaatacttattatcgagttctatttaaatgaattattaatttaattaaatattgataggaagatcatagagttcaaataagaaaatcaaaataagatacgttatttatcataatttcactgccacatccaacctattaaaaataaaaagttcaacttgaattatttaaatgaaacctactattaaaataacatcaaattaagaaagtcttaattagagaaattagaaatatatacttactcattattaattaaataaataaaaggtgtatcatatgtatattagtttgttgtctactttataaaaaggaataattatatgaaaaaaacattactcagtcttgttatgctgactgtaatatcaacgccagtattggctaaaacgcctatcgctaatttgaaaatcaatggtgatatcaaaccaccaacttgtactattaatggcgcaacacaaagtgatgttatttttgatttaggtaaaattagtccatcgttgatccctaaatcatcaaattatatatatcctcataatacaacctcgactaacgtcactattgaatgcgatgcaaacacttatcttacatttaaagccactgatacttatgtaaacagtcagcttgatcttgatcaaaccagtaaaactaaagctagtgggatatttcacctggttaataaagaccaggtagacacttccgtggggggaatactattcgtttggtacaatgtgactgtagacggaaaacccgcatttattagccgggcaaatgatgcaacggtaggtttttcagataataaaactgttatagttaaagaagtcactaatggttggacgacaaaacaacaagaaaatgtagataaaaatagtttagatttaatgccaggtcagattttttctaccagcatttcagcagggaaagcatcttctgcatttattttatctaaagattcattaaataaaaaaggtatagatatttctaacggattagattttatcggcgaggctgttctcacttttaactttggtgtctaatttttagaataattgataatcacaatataaagatttattatattgcgattatctttttatactaatatgaatgttatttatgctatcctagctttcttcctcttctttctgtctgcattttttccgctttctgtgcttcttctatctcacgtattctcacgagaatagaaccgtcctctataactgcagagtcgtcccaaataagtgactgtttattaacgtcgagtggcgtttcaatactgttatcaacacagcccaatttagttgacagagaaaagtaaaactacgttatggagaatgtatgcaaagagaaaggagtttccaaaaccacaaaaaacgaaagccggcacatttttaaattagccagagcatgtctatgaagagtgggttagaagtgaaaaatggtaatgctaatttgacccgttacttgacccgcatatctcgcagatttttttaaaaatcgcataaggtgttgattttaaatggtacgccctacaggattcgaacctgtgacctacggcttagaaggccgttgctctatccaactgagctaagggcgcctagaggggaaatagacgttagcatttatgctgataacgggtgtgaattatactttcaacattctgagagtcaacgatttttccacaaaatcaaactagatggttaaaatatggtaagtaatcaactgacagattgcttatgatctgacaaaatagagcaataccataattgaataatttggatgtatagatgtcagcaagaattatagatgggaaaacgattgcgcagaccatcagaagtgaagtggcagaaaaagtaaaacaacgtattaagataggaaaacgtgcaccgggtttagcggttattttagtcggtgataaccctgcatcgcaaatctatgttgctagtaaacgtaaagcttgtgatgaggtaggatttatctctcgctcttacgatctaccggatactacaagtgaagcagatttactcaatctcattgatactctaaatgaagataatactattgatggtattttagtgcagctccctttacctgcgggaattgataacgtcaaagtattagaacgtattcatcctgataaagatgttgatggcttccatccttacaatattggtcggttgtgccaacgtgcacctaagctacgtccttgcacccctcgtggtattgtcacactcttagagcgttgcaatattccaatgaatggcttaaatgcggtaattattggtgcttcaaatattgttggtcgcccaatgagtttagagctactgcttgcaggctgtacaacgactgtcactcatcgttttactaaagacttacgttttcatgttgaacatgctgatttggtggttgtggcagttggtaaacctaactttattcctggtgaatggataaaacctggcgctattgtcattgatgtcggtattaatcgccttgaaaacggtaaagtggttggtgatgttgatttcgcacaagcctctcaacgcgcggggtggatctcccctgttccgggtggtgtaggtccaatgactgtagcgactttgattcaaaatacgttgcaagcctgcgaagaatatcacgatcctgatataggaaataattaatcaatggaaacatttcaattagatggtcacccctatgtagaactgtgtgatctattaaaactccaaggctggacagaaagcggagccgctgcaaaaaatattattgctgaaggcctcgtttgcgttgatggtgaagtagaaacacgtaaacgctgtaaaattactgccggtaaagtcgtcacactcggtgagtttgctgtcactgtcagcaactagttcagctaatcatactcgttactcaagcgttactctttagtaacgctttttttatctttctaccctttttttactaaacacgctatttttcgagcttttatttaagtctgtaaaattagtggactaatccattgattttaaattgatttaattgcatcaatttaagataataatagtaggttattatttttgctattcatatcagtggtaatactttatctcgtttcagcacattaacgctttgataaagaataagttaaatattgattacataacctattattttttatataaataatacttagtctgctagtagtaagaatttcagcaaccttattccgttggatgatttttacgtattaataatcgctttaatatgctaaaacgtgatttagatctaacttttcctttgttttattaggcaaaagaacattgtttatactaaattagacattatagtttgaaacgattcagcctgataataaagtatgaagcgttatttttaatttttatgttgtatttgatccttaatctaataggagttcttatgtttaacctaccaatccaaggtgtctctctgcttttcttgcaacagaaaagtgatacctatgattttactacaggtaaggtacaagcatgagacgtcgagtcgctaccattacattaaatcctgcttatgatcttgtaggattaagtacccctattgaattgggtgaagttaaccgagtaacaacggcgggatttcatgctgccggtaaaggtatcaatgtagcaaaagtattaaaaagccttggtattgatgtcactgttggcggttttttaggtaaagagaatcaagatggctttcaaaaagagtttagtgaagccgggattgctaatcgcttccaaatggttgaaggtcgcacacgtatcaatgtcaaactcactgaacccagcggtaaagtaactgattttaacttttcagggtttgaaatcactaaacaagattggactcgttttgtaaatgacacactcagctgggcgggtcaatttgatatgatttgtgtcagtggaagtgtaccaccaagtattgatttaaatgattttactgcttggatgaagcgactacgtagcgaatgtatgtgccttatttttgatagtagcagagaagcatttgtcgcggggttaaaagcgttaccttggttagtaaaacccaatcatcatgaactagaaatttgggcaggtagacccttacctgaactctctgacgtagtacaagctgcccatgaattacgccagcaaggtattgctcatgttgttatctcgttaggtgaacaaggcgctatgtgggttaacgcctctggtgcgtggatggcaaaaccgcctaaatgtgatgtggtcagcacggtaggtgccggtgactctatggtaggtgggttgatttatggtttgatgatgaggcaaaccagtgaacataccttacgtcttgctacagcaatttcagctcttgccgtcagtcaaactaatgttggaataactgatcgagaacaattggcaagaatgatgaccgaagttgaattaacgccactaaaaatctaaaaaaaatatcggataataattacccgatatttttgactttattgctttatcaataggtagcaatattagctattacgacgccatgttgtaccttgtgggccatcttctaatacaatccccattgctgttaaagcatcacgagcggcatccgcagctgcccaatctttattcttacgagcatcattacgttgttgaattaacgcttcaattttttctacttcatcagcatcgtctgcttgcgcaccactttgtaagaagtgttctggttgttgctctaataggcctaatactttggccaatttacgcaacaccgctgctaaaccattagccgcctccatattgacggtttttaagcgattcacttcgcgggctaaatcaaataacacagaataggcttctggtgtattgaaatcatcgttcattgcttcaataaactgcgcttcaaacgcttcaccaccagcaggttgagcatttgcatcagtgccacgtaaagaagtatataaacgctctaatgcggtacgcgcctgttttaagttctcttcggtataatttagttggctacgatagtgtcctgataataagaaataacgtaccgtttcagcatcgtaataggcaagaacatcacgaatagtaaaaaagttattcagtgatttagacattttttctttgtctaccatcaccataccggaatgcatccaatagttaacataaggaccatcatgagcgcaggttgattgtgcaatttcattttcatgatgcgggaacattaaatctgaaccaccgccatgaatatcaaaatgatgacctaattctttaccattcatggctgaacattcaatatgccagcctggtcgcccttctccccatggtgatgtccaacttggttcaccgggttttgacattttccaaagcacgaaatccataggattgcgttttacgttagcgacttcaacccgagcccctgcttgtagttgctctaaatcttgacgagaaagcaagccataatccggatcggtatcaatggcaaacatcacatcaccattttctgctacataagcatgaccacgtttaattaatgtctcggtaagagcaataatttctgcaatatgatgtgtggctcgtggctctgaatcagggcgtaagatattcaatgcatcaaaatctttatgcatttccgctaacatacgtgtcgttaattgttcgcaagtttcattattttcaatcgcacgcttgatgattttatcatccacatcggtgacattgcgcacataattcacatcataccctaaataacgtaaatagcgggttatggcatcaaatgccacaaatgtacgtccatgaccaatatgacataaatcataaatagtgatgccacacacgtacatacctatttttcctttatggataggtttaaattcttctttttgtcgagtaagagtattaaaaatctttagcatcagaggacgttcccatttttaactgtacgtgttgattacgtatttatgtatataaaataacgactacagcgataaaaataaccacataacattacctttataagggttttaatgcctaaactcaaaggtaatccaattaatagtctcttatattactctgctctgcgtttattttcactgttcaatcgttaacagtaaggcgccaaattgagtttattggtgaaataattggcgaaaaatgttttctattactattttcgcgatttttagcctgaaagtcgccatgaacaaaagatgaatactgactaaataaggtaactgtggtataaaaaaacggtctattgtttcagcccacatctgggtaaaactaaaattatactaggatctgaatatggttacttttcataccaattacggcgatatcgtgattaaaacatttgcagataaagcacctgcaaccgtagaaaattttttagattactgtaaagaagggttctacgataacactatcttccaccgtgttattaatggttttatgatccaaggtggtggttttgaacctggtatgaagcaaaaagaaactaaagccccggtaagaaacgaagcaaacaacggtcttgccaataatcgtggtacattagcgatggctcgtaccaacgatccacattctgcaacagcacaattctttatcaacgtagcagataacgacttcttaaacttccgtgcagaaaatgccaatggttggggatattgtgtatttgctgaagttgttgaaggaatggatgttgtagacaaaatcaaagccgtttctactggtcgcagtggtttccaccaagatgttcctcgtgaagatattatcattaacagtgttactgttagcgaataagtagcgctttttatgtgcaccctgtttattgcagatctgcatttaagtgagcacgaaccggcaattactgccggttttcttcgctttttacaagagcaagcgatccacgcaaatgcactttatattttgggcgatttctttgatttttggattggtgatgatgatcctaatccactacatcagcgcatagcccaagcattaatggcattaaaaaatgcgggagtgccctgctattttattcatggtaaccgcgatttcttaatcggctctcgctttgcaaaagagagcggaatgacactgctaccacaagaaaaagtgcttgagatagagcaacatcgtattttaatcttacatggtgatacgctttgcaccgatgatgatgcctatcaacgctatcgtaaaaaagtccacaataagtttattcaacgcttattcctactccttcctctgaccattcgattacgtattgctaaaaaaatgcgctctcgtagtcaaagtagcaaccaatacaaatctgaagcgataatggacgttaatgctcaagccgttatcaatacctttaaacaatttaatacccaatggatgatccacggtcatactcatcgaccggcgatccacaccgtcgacattgatgggaaaccacattatcgaggtgtattaggagcttggcatacggaaggctcaatgtttaaagtcacctcagataaaatcgaactgatccaatttccattttaaatagatgatactttttcggctattgtagcatatttttctttacgcaaacgttttccttgacgtgttagcgtgatactatcatgctcagtttctctggctatatccgtttatgcttacaggagcagttaagtaatgtcttctcaagttggtctcaatacctcatcccctcgtatcgccattgtgatgggttcgaaaagtgactgggcgacaatgtgtcatgccgcagaagtcctagacacgttacaacttccttaccatgttgaaattgtttccgcacaccgaacaccggataaattatttcgtttcgcagaacaggccaaagagaatggttttgacgtgattattgcgggtgctggcggtgctgcacatttaccggggatgttggcagccaaaaccttagttcctgtattaggggttcctgtacaaagtgctgcattaagtggtgttgatagcctttattctattgtacaaatgccgaaaggtattcccgttggcacactggctattggtaaagcgggggctgctaatgccgcgctacttgccgcacaaattttagcattacactctgctgatatttttaatgcattaacacaatggcgagcaacacaaacacaagaagtccttaatcaccctgatccaagggaggcgctatgaagccggtttgtgttcttggtaatggacagttaggtcgaatgttacgtcaagcgggtgagccattaggtattgcggtatatcccgtagggcttgatgctgaacccgaagcggtaccttatcaaaagagtattattaccgcagaaattgaacgttggccggaaaccgcattaaccaatgagttagagcaccatgctaactttattaaccgagatatttttccattactcgcagatcgcttaccacaaaaacaactccttgatgaacttcatttagcgacggcaccttggcaaccattaacttcggctgagcaatggcctgagctattcaatcagctaggggagtttattatcgttaaacgccgtgttggtggttacgacggacgaggtcaatggcggatacacccaggtgacgaacaacaattaccagccgaaatatatggtgaatgtattgtcgaacaaggtattcctttctctggagaagtctctttagttggtgcaagaaatcgtcagggggattgtgttttttatccactcactcacaatcttcatcaagatggcattttacgcatgagtgttgcgctaccaaatcctcccgaggcattacaacaattagcagaggatatgcttagcaagatcctcaataaactaaattatatcggtgtaatggccatggaatgctttattgtcggtgataaattactgattaatgaactcgcacctcgcgtccacaacagtggtcactggacacaaaatggtgcttctattagccagtttgaacttcacttacgtgctattcttgatttaccgatgcccaaacctaatgtttgccaatcggcggtaatggttaatcttattggaacggagatcgacatcaaatggctatcattacctttagttcatctacattggtatgaaaaagaagtgtgtccagcccgcaaagtagggcatctcaacttagtacataataaccatcaagctctgcaaaagagcttaagtacattaagtcccctgctcgatgaagcctatcaatatccgattaaatgggcgctagaaaaattaagctagcagtccgactcagaaagttagagaataatagcctttaaatgtactggcctgtgaatacaaggccagttattcgctattttttcctgaacattcaggatactgcacccgttctatggagtcaggatgccagtcacgcaacaaaattttggtcctatctatcagtggagcatactgatactgctaggtttagtgtactttctcgctaccgcaacaacatttacctctttaggtgtggttctacctagtatgatagctgaactagagtggaactggacacaagctggccttggttttactttattgggcttaacctgtggacttgcgagctttttacccactttacttatccgtaaattaaacgtccgcttcacactcctcattggactgattatttttgtcagtggattctattttctatatgaaaccaataccatcacacgctactttcttggtaccgccttacttggggtaggttttacgctattagcaaccgtaccgggcacttacgtgctatcgcgtctatttgaaaaacagtcttttgcttttggtgtctattttactattggtggattgggaggagttgcaggcccttggatctattttttagccacacacctttggcacacatggcgtatgcattggctcatttcagctattattctatcaattattaccctgctgactattttagtattacgagaaggctcagcagaaaaagcgcatgcgaaaaaaatcagtcaattacaaagtagcaaacgtatttatcaaaccaaagcgatatggaccgcacgtcatgctttacgaacatggcaattttatgtcattgctgccacttacaccgcttttctatggtgcgggatcacagtaaatagttttgcagttgcacatattattgaaaatggttttagtgaaactattgctgcaacgctactgagcaccatggcttttatcaatgcattctcacgattagccggtggggcgattggtgaatggttagagcctaaaaaattactgattgccagcttaacgattattattatcggtctattagcactgagtatggctaatagttggatctacctaatgctatttaccctttgtgtggggatcggttatggtatgaccttcttagcctcaagtgtattactggctaactattttggtcgcgcaccttatttagaactattttcggtgatgaacctgatctcaacattggcctgtttagcccccttctttgctggggctattaaggatatttcaggcagcttcacacctgcatttttaattctcactatccctgttttagttattttggtgatcacactatttatgcgcccaccaatttatcctaacttccaacatgccagtgaaaaacataatgcgccaagataaaaataaaaccgcaaatctagtttagaaatccaatcaatattatagagaagcggttttagcgaggagagatcgagcagatgaatgaagaattaatcatgaaatactcaattggtatcggcatagctttggcgtgttttatcgcctttcttgccatatcttttttacatgataaacaaaaaaaacgtcgtagaaacataattattcacatcatccaagctattttactttgtagtttagtggctattgtaagccaatactgtgaaatggcggtggtagattttaaactacactttatctcttttcagatgattaatttctttagctatcttgctatcgcattaatcctgatgagaaaatttttcttactcattaatttattagaaaaatcacaaattaaaaaaggcagtgatcctacctcagcccgtattatttcgcgtatatttaaaatcactcttcttgtcatcatgatcttactgttcggtgagcattttggcatgagcttatcgggcttaatgacatttggtggcttaggcggtattgccattggtatggcaagtaaagacgttatgagtaaccttttttcaggtgttatgctctattttgatcgcccttttaacattggtgattgggtacgttcacccgatcgcaatatcgaaggaactgttgttgagattggctggcgtatcacgaagataatgacctttgatcatcgcccgttatatattccaaactcagtattttcctccattagtgttgaaaaccccggcagaatgaccaatcgacgtattgaaacagaattagggttacgctatgaagattcggacaaagttggggttattgtcgaagatatccgcacaatgctacaacaaaacgacaaaatcgacaccaaacagactttattggtctattttaatcaattcgccgattcatcattaaatattatggtgtactgttttaccaaaaccacggtatgggcagaatggttagatgcgcagcaagaagtttatttaaaaatgattgatattgtgcatcaacatggcgctgacttcgccttcccatcacaaactgtatatattgaaaaatcatcgcctgtatcaccataagcatccgataaaaaaatgctgatatccgttcgatatcagcatttttaattcaatatcacgtatcacttcatttaatgataactagataactaatggcgactattctccctgaatacgacgatattggcctttatcttgtaatagcctaacccctaaaatactgccacaaagtgaaagtaatacggcggcaagagcgggaacaactatccacatcatccattgtggttgccatgggaaattaaataccgatttttgcaacaaccctaatgcaacttcagcccctatcgctgcagctaaaccggccattaaccctaataaggcaaactccgcccaaagcgtgcgtcttaatagtgacttactcgcgcctaatgttcgataaaccaccaactcgatacgacgttgtgtcataccgacttgaatttgtgccactaatagcaatgccccacacagcataactaatccaaccataatttctaatgctcggctgacttgctgtaagatctgctgaacttgctgaattaatgcccccgtatctagcacactgaccgtaggaaattgtcgatttaatgcggtgatcaaacttccatcaccattgtaataaaaactgctcatccatttttcaggctgattgcttagcccttcttctgcgaaaataaagaagaaatttggtcgcatattttcccaatcaacatggcgaatgctggtgacaacagatttaaactcgcgagtatcaccaacaaaagttagctcatcccccagctttatttctaacttttgtgcaaccccctgatcgattgaaacgccattaccgacgggaggccatgagccttcgacaataacattatctttaggaagttcactgtgccacgttaaattaagctctcttcgtacggtattattccccgcatcccgtgcatctgcccacactttcgcattgtgatcattaatcgctgttaaacgtgctaacacaaccggataagcatctgtcggtgccacatgataagtggctaataatgtattaatctgctgtacctgaggctttgacatattaatcaagaaatagttaggactatcttcaggtaactgctgttgccatttttccaataaatccccttgcagcaaaaccaatagcgtcaatagcataaaggataatgaaaaagcggctaattgcgtcatggtttggaaaggctggcgtaataaacgtgtcaccgctaaacgggcactcaattgcttaaatttaaattgctttaaaagccataatccaagccaaccaatcacgccgagcaagaaagcaatgacgacgatacctaataaaatagaccacaataaaacacccgttccggcaaacagagttaaagcgccaacaacaatcaatgcaacaatgggtaaataataacgtagtggccaactaggtgccgtagtaccacttctcaacacgcgggaaggttgcgttgacattaattggtgataagggcgtaaacccgtcaataacgcgatgagtagtaaagagccaactgaccatagccatggcataaagctcgcatcaggtaaactttttggtaataccggtgctaaaatctgcaacaatactaattcaaagccccaaccgaccagtgagccgaccacgatagccgcaacaataatcacaccccactgacctataatccatttacgtaatgcatgattatcagcacctaaggtttttaataccgcaattagcgtatgtcgactacggcaataatgtgtcattgaaaccgcaacggcagaaatcgccaatagtagtgttaataatgcagataatagtaaaaagttttttgctctctccattgattgagatagcgcaccattatcttgttttaagctattccaacgctgatccggttttaataagggatcaaagcgttgttggtattcatcaattaatgcttcattacccgcaaacatataacggtaagttaagcggcttcccggctgaacggcaccagtcgcttcaacatcagcaagattaattaaaatacgcggggcaatttgaaaaggattaaaaccactatcaggctcttgaactaatacaccgctaattgtaaaagtggcatcaccgacatcaatattatcaccaaccttgatccccaaaagcgccagtaaccttgcatccactaacgccgtgcctttctccgcttttagccctacaggctgagtttctagctcaccatagagtggatataagttatccgcggcttttaccaacgccaattgaggagtatcaccttctggggcataagacatggtggtaaattgcatttgacgactaagtgttagccccattcttttagcttcagctagccaattttcatcaacaggatacgaggcgcgtagcactaaatcaccggcgataagatcacgactttgagcataaatacttttatcaatgcgatcaccaatacgccctaacgccagcacacaagccaccgccagcgctaaagagagccaaacaattaataaagccggcgagcgccactcacgccaaaaccaacgccagatcatgactcctccttaagttgcccatcaacaagacgtaatcttcgctgacaacgagcggcaagctcattatcgtgggtgaccaaaattaatgttgtggcataatcacgattaagggaaaacagtaaatcggcaattttatctcccgtttttcgatcaagattacctgttggctcatcagcaaacaggatcgccggttgggtacaaaaagctcttgctaatgcaacacgttgttgctcaccaccggaaagttgtgcgggcatatgatacaagcgctcacccaaacccaattgtttaagtaaatcaacggctcgcgtatggctctgtttttctgactcaccttttaataacgcaggaagttgcacattctctaaggcatttaacgttggaattagcataaaagattgaaaaacaaatccgacatgttgtgcacgtaattttgcccgctcttcttcattcattttggtcagatcgtgtcccattaattgcacacgaccagcgcctccatcatctaatcctgcaataatacctaaaagtgtagatttgcccgatcctgactcaccaattaaagcaattgtctgtgcagactcgacaactaactcaacaccctgcaatatagagatctgactatcaccttctcctacttgtttggttaactgatgaacttcaagaaccttttccgtcgacatacttgtttccttatcgtcatgatgatgtttagctttaagtctatcgctgctgatacctttttgatctttggtgacagcctaagtgccggatatcgccttcctattgaaagcgcatgggcgcaacgcctcgcggataagtggaaattaacttatcctgaaataaatgtcgtaaatgcaagcatcagtggcgaaaccgcatttcaaggtcaaaataggctccctgatttattaaaacagcaccaacctcgttgggttttgattgaactgggtgcaaatgatggcttacaaggctaccctgtagcccaaacgaaagaagcgttgcaaaacatcattacccaagtaaaagaagcgggagcaacgccactctttatgcaaattatgatttcgcctaattatggtaaacgctatacgcaatctttttctgcgatttacccacaattggcgaaagacaatgctcttgagcttatcccattttatatggagcaaatagcagataaacctgagtggatgcaaaacgacagcattcacccaaatgaagcggctcagccttttattgctcaatggatggataaaaccctatccccttacctaacacgttaaactattgtgacagtagttaacctagattaaatgagattaattgtaaaattatgcaaaaaacggtattgattacaggaagttctagtgggattggactgtgtgcggcaaaaacactcaagcaaaaaggatatcgagtactggctgcttgtcgcaaagaagatgatcttaaccatatggaaacattggggtttgagcctatttttcttgatctcgatgacgcagaaagtatcgaaaaagccatattagaagtcattcgccttactaatgggcgtttatatggattatttaataatggtggttttggggtttatggtccattaaatgcgattagtcgccagcaaatggaaaaacaattttccactaatttctttggcttacatcagcttactatggggttactgccggcgatgttacctcatggcgaaggacgtattattcagacgagctcggtaatgggattaatatccactcccggccgaggtgcttatgcggcgagtaaatatgccgttgaagcttggtctgatgcattaagaatggaacttgcctctacggggataaaagtcagtttaattgagccgggtccaataaaaacacgctttactgaaaatgttaatcaagcccaacaagataaaccggtaaaaaatccggggattgcgagtcgtttcacattaacacctgatgatgtagtgaaaaaactaatccatgctttagaaagtccaagacctaagttacgttatcctgtgaccttactcacttatgccgtcaaagtgttaaaacgactcctccctgatagacttatggataggatcttaaacggccaaagtaacaaggcttgatttttgtaaaattcatccttatttattaatgaaatagcgtaataaacagcatttatatttaaaactctcaaaaagggataagttaatgttagcaactgcacatattgttgatgtaaatgaatcgaatattcagcaagttatagaacaatcgatgacaaaaccggtcatgatgtacttctattcagagcgtagtcctcattgtgcagagcttggggcaacgttggataaactagcggctgaatttgctgatcagtttgtattagctaaattagattgtgatgttgaacagatgattgcctcgcaatttggtctacgtgcgatcccaactgtttatatattgcaagaaggtcgtcctgtcgatgggttccaaggcccacaacctgaagaagctattcgccaaatccttgccaatatcttacctaaaccagaagaattaaaagcagcgcaagcttcagcactattagcagaaggtaaagcagacgaagcattaccactgttaaaagaagcacaccaaattgatcctaaaaacagtgaaattaccttagccctcgcaggtgctttaatttcattaaataaacataatgaagcagaagaattattagccgcaattccattgcaagatcaagatagctattatcatagtttattagctcaaattgaactgcaaaaacaagctgccgacacacctgaaattcagcaattacaagataattttaatcagcaacctgacaatactgaactcgctattcaactggcgttaaaactgcatgaagtggcacgtaatgatgaagcccttgaattgctatttaattttctgaaaaaagatcttaatgccggtgaaggacaagttaagaaaaccctgatggatattttatctgctttagggactaatgataatctagcatctaaatatcgccgaatggtgtattctttactttattaatattcattttatttattaaagcaggctaaggacagatacatggaaatagttattggtattattatcttattcgccattattttagttttaagtggtgtaaaaaccgttccacaaggttatcagtggactgtcgagcgttttggacgttatacacgtacccttgctccaggccttcaactccttattccatttattgaccgtattggtcgtcgtattaatatgatggaacaagtattagatatcccttctcaggaagtgatttctcgtgataacgccaatgtcagtattgatgcggtctgctttattcaagttatcgatccagtaaaagctgcttatgaggtgaataacctagagcttgcaatcatcaatctaacgctaaccaatatccgtactgtgttaggctctatggaactggatgaaattctttcacaacgtgatcagatcaatagccgtttattactgattgttgatgatgcaactaacccatggggtattaaaattacccgtattgaaattcgtgatgtgcgcccaccacaagagctaatttcagccatgaatgcgcagatgaaagctgagcgtactaagcgtgctgatattctagaagcagaaggtatccgtcaagcggcaatcttaaaagcggaaggtgaaaaacaagggcaaatcttaaaagcagaaggtgaacgtcagtctgctttcttacaagccgaagcccgtgagcgtgcagcagaagcggaagcaaaagcgacgcaaatggtatcagaagctatcgctaaaggggatatgcaagccattaactactttattgcacaaaagtataccgatgccctgtcacaaattggttctgccgataacagcaaagttgtaatgatgccattagaagccagtaacttaatgggtgcaattggtggtatttcagaattattaaataccaaaaaaagtgactcaggtaacaagagcaattaattatgattgaatggattagtgctcagccagcacttttctggctttgtcttggtgtcttactattaatcgccgaaatgctgggcactgcaggctacttactatggtctggtatggccgcattatgtgttgcattaatcgcatggatcttacctattggttggcccattcaaggtattctatttgcattactcaccgttattagtgcaatcctttggcgtatctggcttaaacgcaaaaagttatccaaagaagcagaaaacctaaaccaaaaaagccaccaacttattggtataaaagcagttttgttatcggatactgaaaatggttttagtcgcataaagcttgctgatgggagttggcgagtctattctgacacgccattaaaagcaggtgatacagtcaaagtgattgctattgatggtatcaccttgcacgtcacctcattttctcccaccactcgctcggcatcatcaacacagcatgctgctgttattgatgatgacaacaaccagaaagatgattgatgattgggcattccgccccatcatcgccagggcattcatttgctaataagagaagccgttgacgaatggcatttaattcgttaatggttttctctatctcagccactttctttaaggttgcctctttcacatcagcactgtgacgtgagggattacgtaataacatcagcaatgaacgacactcttctaaactaaacccgacttcacgagcttgctttaacagtgttaattcttcgatatgttgtggtaaatagtatcgatagccattttcaccccgatgaggtggggttatcagatctttttcctcataaaaacggattgcttttgtcgtcaaaccggttttggttgcgatttcactaatattcaaaattcccccttgaccttccccttgcggaaaggtttagcctttatctcagataagaaaaaaccttttcaagaaagcaagttatcccatattacgccataatagaggtaatcgctttttatttggagatattgaccatggcaaaaactacgctactcgcactacaagggctttcatgctcccactgtattaacagtgtaaaaaaatcacttgatgcccgcaatgatatagaacagtccacggtgactattcaatacgctaaaattgacagcgacgcaactgttgaaagcttaatcaaaacaattgaagaagccggatatgaagctcatctagccactcaagctgatgtaaaactaaatttgagtggacttaactgtatgaaatgcgttggtaaaacagaaaatgcgttattagccgttgacggtgttgttgcggtcaatgtagacaaaacatcagctgaaatttttggtacagcaaacgcaaaagatttaattgccgccgttgttgctgaaggttttgaagcctcattagcaaacgaagaagaaaataaaccaaaaacgattgaactgactttatcaggcttaaattgtggtcattgtattaattcagtgaagaaagctcttgaagggactgatggggtagaaagtgcacaagtggaattaactcatgccacagtaacaggtacggcaaacacagagcgtgtgatcacagccattcaagatgctggttatgatgcaaaattagcaggagccaaccacccaaaaactgagccgctgacgcaaacggatgcaccactggaagcatcgtcagcggcgatttgtgatattccagtagaagaagccatccttgataataataatgctgatatcagtatcgatgatgatagcactcagctattaatcgacggtatgacttgtgcaagctgtgttagcaaagtacaaaaagccttacaaagtgtttccggtgttgaaaatgcacgtgttaatttggctgaacgtagcgcacttgtaaccggtcatgttaatcatgatgacctgattaatgcggtcgaaaaagcaggctatggggcagaaattattcaagatgatgtaaaacgtagagagcgtcaacaagaagtcgctgttgctaatatgaagcgttttcgctggcaagcagccttagccttagtcgttggtattcctgtaatggtatggggaatgatcggcgataatatgatgttaacggaagctaatcataatatctggttaactatcggtattattacgcttattgtgatgatagctgcaggtgggcacttttatcgtaatgcgtggcaaagcctaaaaaacggcagtgccaccatggacacgctcgttgcgttaggtacaggggcggcttggctctattcaattagtgttaacttatggcctgaggtgtttcctgcccaagcaagacatctctattacgaggccagtgcgatgatcattggtttgataaaccttggtcatatgcttgaacaaagagcccgtcagcgctcttctaaagcattagagcgtctattagacttaacaccaccaacagcaagagtagtaacagataatggcgaagttgaaatgccattagcggatgtgaaacaaggtatgatcttgcgtttagcaaccggtgataaagttcccgttgatggtgaaatcacccaaggtgaagtgtggatggatgaggcaatgttaactggtgagcctattccacaacaaaaaagccttggtgataccattcatgcaggtactaccgtgcaagatggctcagtgctgtttaaagctgcagcagtaggcagtcaaactacccttgcccgaattatcaaactggtacgtcaagcacaaagcagtaaacccgaaataggtcaattagcagataaaatttccagtgtatttgttcctatcgtcgtcgttattgcgttaattgcaggggctatttggtacttttttggtccttcaccacaaattacttatgcactcgtcattatcacaacggtattaattatcgcttgtccttgtgctctaggattagcgacccccatgtcgattatttcaggtgtgggacgtgccgcagaatatggcgtattagtgcgtgatgcggatgcattacaacaagcaagccaattagataccttagtttttgataaaacaggtaccttaactgaaggcatgccacaagtaactgagatccacacattcaatcagataagtgaaactcaagcgctagcattagcaggcgcactagaaagtggctctaatcatccattagcaaaagcgattttaaccaaagctgaaggtattaaattaccgcaaataagccaatttagaactcttgcaggtatggggttaagtggtgaaattgacggcaatattgtgctgttaggtaaacctaaactaatgaaagaatctggcattgatataagtgagataaacgccttaatagaaaaccaatcagcgaaaggggtaacccctgtcttattggcgcaaaatgggaaaatagcggccctactttctattcgtgacccactgcgagaagataccgttagtgcattacagcgtctacatcatcaaggttatcgtttggtcatgttaactggagataaccctattacggctaatgcgatagctaaagaagcgggtattgatcaagtgattgcaggcgttatgccagaaggtaaagcgcaagcgattagtcaactacaggcagaaggtcgtcgcgtagcaatgattggagatggtattaacgatgccccagcactggctaaagcagacgttggtattgcgatgggtggtggcagtgatatcgccattgaaaccgcggccattaccttaatgcgccatagcttacatggtgttgctgatgcggttgagatctcaaaaggcacactgcgcaatatgaaacaaaacttgtttggtgcatttatatataacagtttaggcattcctattgctgccggtatcttatatccttttaccggtacattattaaaccctgtggttgcgggggctgccatggccttatcatcaatcactgtcgtcagtaatgccaaccgattattacgttttaaaccgaaaaaatagtcgcaattaatcagtcaaatacagcctcttctatctttagataccagaggcttttttattatccagagagaattatcatcatttcaataagttaaaaaaaagccgatattgctatcggccagtcaaagaggaatttttcattatacaagagagtcatcactccgccctcttaacgatagaatagcaatttattatcaataattcattatattttattatttataaatatattcattaataaaaattaaaaggcgttttatttatagtgattaaaaaaacattttataaaataagccacttatttttatactttatatttttataaggactttttaatgaattataataaattatttcttatttctttctctttaatttattctgcaaatgttttttctaatactgatagcccattaccaacagataatccttcacaattaggaaatggttctatggtagaatcaaatataggtattccctcaacatcaacaactcatctaccacaaccaccattaatgggtaatcgcgcaccagtaattagcccaagcccattgccaacaggtaatacttcacaattaggaaatggttctatggtagaatcaagtgtaggttcagaaacagaaccaacgactcatctgccacaaccaccattaatgcctcatctaccacaaccaccattaatgggttatggcgcaccaacaataggtaatacatcaggatataggacacaatttccaaatacagatgctaatccaattaaaacaattaaagcaattaaagaaattaacacataccttgacatgactgaccctgcaaccaattatcatagtaaattgataggtgaatacatttcagcctttatttctatttctagaccttctacatctacatcatctgaaaatactgtagtcagcctttctaaacctttttttgatcgtatgtctaaagcaatagatgttgattctgatgaagatggaagtatgttagtggataaaagtaaaaaggatatcgctcgtactatgtcttcttatttagaaaatctagaagcagactttttagaaacaatgaacgatgaaaatactagtgaggatgaaaatactagtgagataagactaacacagatggcattattacatcagatacaagattttaaaaatattgttgacgaaagtatagaaaaaggtacctcttttactattgttgcaaatcaagatctagaaacagcagaaccattaactgaaatccaaatgattactaagcgattatcgcaaccagtaacacgagttgatattgctaatgcatatgttttattatcaggaaaaatagataatgaagttggagctatagcgaatcaacaacaaataactactgaaacgttaactttacaggataataaaattactaaagtagaaagtgatgtgaaaaaaaatgaaggtaatatagctgttaatagagaaggtattactaaagtagaaagtattgtagaaaaaaataaagaagatatacaaacaaataaagaagatatacaaacaaatagagaaaatattaatcaagttaaacaaactgctgacgaaaataaaaaatatgtaaagcaatacctagctaatgatttcgatgttaatgaacaatctaaaagtttagtaggtcatcttggctctttatatgcaggaaataagttaaacacagataatattaatgccattagaaatgatcttagccattttaaaaatgaaaccaataatcgtttctataaagttgaaaagcgcgctaatcaagggattgcctctgttgcagcgatgagtaatttaccctttaatgatgcagcaacctttagcaccgcaatgggtatcggtaattatcgtaatgccacagcatttgcatggggaatgcaataccgtatcaacgaaaatgttaaagttaaagcttcaaccgcttggaatgacgctaacaattgggtctctgcgggggggatcggtattagttggtaatataaatttataaatatagcggtaaagataaggaaagctaagtaaaactcagttttccttgttttattcaatacaaaatccgttatgctacaaccttgtggtttatcccatgaggagcgtatcaaatgaaggatataatacagaaaatcaagaaatggatcggtatacagaatacatctgattacccctatcctgctattgatatttcactccctaatcatgtctctttacatcttgttggtagtatccatatgggcgtgccaacgatgtcaccattatctaatgtgctgattaataaaatagcaacagcggatgcggttattgtcgaagctgatatttcaaccgaaactcagccctttgatcaactatcgttattgcgagagccattagaacaacgagtaaatgaaacacaacttgccactatcatcagccattgtgatcttctttctattccacgttaccaaattgatgataaaccactgtggcaaatcgcgctgatattacaatcaacccaagcgatgcaacttggattacaaccacagcacggcattgattatcaagttatccaacaagccaataaacaacaaaaagcgattatagagctagaaggtattgagcgtcaggtcgcattattattagattttccacaagatggcgcacaattactcgaagatacgctaaaaaattggcatgaaaatgcacgggcattgcaaattatgatcaattggtggttaaattataccagtgaaaagcacccttctcctttgccaaatacttttagcaaagcggtatttgatattttaatggaaaagcgcaatcaagtctgggcaacaacgctttctaatcttccagcaggccactatgttgtcaccgtcggtgctcttcacttatttggtgaagataatttagttgatcgattaacttatcaagcataacaagatcacgttcaccattgctctcaccttattgagtaggaataattatgactcccgcagtgaatttactggaaaaacaaaaaattaaatttactcttcacccttatgaacatgatgcgaatgtacataactttggtgatgaagccgttgaaaagttagggctagataaccgtcaagtgtttaaaacgcttctcgttgcgttaaatggtgatgctaaaaacctagccgttgcggtcaccccagtatcaagtcaacttgacttaaaacgagtcgccaaatgccttaaagctaaaaaagcagaaatggccgatccacaaatagcacaaaaagtaacaggttatttagtcggcggtataagcccattaggacaaaaaaagcgccttcccacggtgattgatgatcaagcacttaagtttgacactatctatgtctcaggaggtaagcgagggctggatattgaactaacggctgaagatttatgttcagtattaggtgcacaatttgccctgatccgtaaagaggattaagagtaacagattgcttattttaggcttttatatcaaccaagctgccaataagaaataaaataacaaaaggcgacatcctctgccgccttttgggaattatctattgtatattttcaataaatactattttttatacacaatctcgccttgcggttcaaaatcagccgcttttagtggtgagtgtttttcgatataaccttttaacacttctgcatcaacaaaaccggtattgacatatcctgggtgtgaatcaatcttaggataaccatcaccaccaataccgttaaagtttaatgtcgccatacgataatttttagttttatctaatggtttgcccgcaatttttacatcactcactttacaatctgcatctacggttaaacttacattgtaaaattgtgcataagcgcctgagtctactttcatgcaagcaactgcggataggtaaggttcaacttcttcacctttgaaatcaacatagacgagttcgttagcaaagggttgtacttttaatacatctttataagtaatatcgccagattcaatcgaatcacgtacaccaccaccactcataatggcaaaatcagcatttgcacgctccgcctgagcagataacagtaaacgcgccatattcgtttgttcaaaacgaactttgctacgatcgccttctaatttaccaacaacttcccccactttcacattcaattgctcaccacctttctcttgataaggggtcagtaatttcatcatttcagggttatgagggatctcctctgtgtagtaaactcgctcagtggttccgtcttcttttttcactttcttatttaagttaattggaattaactgatagtgttttaatgtgaactcaccattacggaactcaaaatcagcgcgacctacatatttaccccattcatgggcttgaacaatccatgtgccattttgattatctggagcgcaaggcgtgccgggaacataatctgcttgtttgtaatttttattctcttgagacatacacaccggatcttgtgagtgtccaccaacaatcatatctaaatagcctttcggcaaagcacgcgccatttcaacatcacccggtgcattagagccatgattaccatcgtcataatgccccatatgggtagcagcgataataatatcgggtttttctgtggtacgtaattcttcaacgacttttttcgcttcatctgccggtttacggaactcagtatcagggaagttagcaggattaccaatacgcacagtatcatcggtagttaaacctaataccgcgattttcactccttgtttatcaaaaatagtataaggtttaaataaacgttcaccggtacttttttgataaatattcgcagaaaggaaagggaaagtagcccatttttcttgttggcgtagcacttcgagtggattatcaaactcatgattacccagcgccatagcgtcataaccgacaagattcatccctttaaaatcaggctctgcatcttgtaaatcagattcaggaacccccgtattaatatcaccaccagacagaagcaatacgctaccgccatttttagcgacttcatcgcgaatattgtcaacgacggttttttgagcagctaaaccgtactcaccatgatcattgtgccaaaagtgaccgtggtgatcattagtatgtaggatggtaatttggtaagttttatctttttcccatgcctgagacatcacaggcgccattgctaaagtcactgtcagtgcgcatgcagataatttaaacgataagctcatggtctatccccatgtatattatttattgagaaggctctgccctgtattcacagtagaaaaagcagaaagaagtaaatagttttactgtgttttatgacgtaggttatatatttttattattatttcattgttccaatagtttttttgagacatcagtcaaactctatttgctttgacatcctccacgccctaaaggacgtggatccctactgcgttcagactgatgtctgaatcacctcggcgagttcctgcttcgacgggcggtctgactgcaccctcccttcacaggcaagcacggcatgtcctgccgctaaaatgttacgtgccccgttgatatcagcattcgctgtatatccacattcaaggcactcgaattgactttgtgactggcggttttcctttgctgtatgaccacagcaagcgcacttctgactggtgtaggtattgccagtacctgaccacctcgccagagctgcttgtactcaagctgacggcgcatttcataccagccctgctccagtattgagcggtttaaaccagatttagcttttacgttccgtccatgccgttctgtcgtaccttttgccgatttagacatgttactgacctttaagtcctcaatgacaatcattgcgtggtttttgctgatttcgctggtgactttgtgaagggagtctttcctgatattggcaatatgagaatgcagacgttgaattttgcgcttttgtttttgccagttggcactgaatttgattttacggcttaatttccgttgaagccttgccagctttcgctggtttactttaaaactgctgacgggcgggtataccgtaccgtctgaaagcgtggccagttttgtaacgcctgcatcaagcccgactattgaggttgattcaggttgtggttctgtcgcttcatactcagtctgaatgctgacgtaccatttaccgcatgactgactgaccgtgacgtttctcacttctccgacgacttcacgactgttgcggtagcgcatccatcccaactttggcaatgatatacgactattggattgatccagcttcacgccctgcgggtagcgaaaagcgtcatttttaccgcgtttcttgaatcgaggaaaagcggtacgcttctggaaaaaattcttgtaagcccgttccaaatctttaagtgactgttgtaatggttgtgatggggcttccttcaaccattgtgtctctgtgtcagatttccactcgatgagccatgaagccatttttgtatagggaatgtatttattccctgcttcgtgattcttattctgacgtgctaatgcccgattgaaaacaaaacgacaagcccctgcaaagcgtctcatctcacgctcttgctgaccattgggtcttaactggaatttaaaggcttgtagacgtttcatattacctattatactttggtctatgaaaaatgaaactaatattcgccgtggcagacattgtgtattcctgatgccgtccatttggtctttgtcacaaaataccggcgaaaaatatttgatcaggatgcaattgaaaaattgcgaggctactttgccagtgtttgtgctgattttgatgttgaactggttgaaatagatggggaacgggatcacgttcatttactgattaattacccgccaaaactggcgatatctaatctggttaacagccttaaaggggtatcgagccgattacttcgacgtgatcgtcctgatattgcccaacgttattactacaagggggttctttggtcgccgagttatttcgcggggagttgtggtggcgcagcaatatccattatccgccagtacattgagcaacaggaaacaccgagttagttaaaaaaccgcgccttatatccccgacctgaaggacggggttttacggtgctttggataacaatagcaataacttactaacaaaaaagcatacattaagttgtgataacaaatttttggctatttttactccattataggtaagaacgactataatttaacttaaaaaataaatttcagttatgaacatctcggggacaatgttgcccgttcccctatcgcaaaaacaaagtctgcttattgatattatgttaatcacagcattttctactgtgtagcatagtgctcaatagttattcactactgaaataaccatagttagcattttttattttatctgagttttacttgggtcaatatgagggatactcgtcttagcgattgctctctaatttaaaaaaacattgaacatgttgagcctaatgacacttatctatctttattgattatttccatactttttcttcaccagatcctgaccaataaagctaaataagttgtatttatttttacaacctacaaccaatctaaatagtctatatcaagcttatacaaagaagatctaccaaaataacacagaaacactcagttacattataaaactaaatcaaattgctattttcataaaaattcaataaattttagcgaaattatcgcttagatacgttaaactaaccgtctgctgtaccactcgccccccgatacatgtagtttaataacaagaaggagaattgatgccgcattcaaccccactcattaccaccattgttggtggcttagcacttgcttacatcttaggcatgattgctcaacggctaaaaatctcacctttagtaggatatcttgctgcgggtgtgctcgctggcccatttacccccggcttcgttgctgatacctctttggcgcctgagcttgctgaaatcggtgttatcttactgatgtttggcgtaggtttacatttttctttaaaagacctaatggctgtaaaagctatcgcgatccccggtgccatagcacaaattaccgttgccaccttattagggttagggttatccactttctttggctggggtctatttagtggcattgtctttggattatgcctttcaacggcaagtactgtggtattgctacgcgcactcgaagaaagaggtttaattgatagccagcgcggtcaaatcgctattggttggttaattgtcgaagatctcgctatggtattagccttagtactactaccagctattgccaatatgcttgaaagtagtgaccaaacaagtatttcacagttattaattaacttaggtatcactattggtaaagtagttgcctttattttaattatgatgattgtcggtcgtaagcttattccgtggatcttagctaaaacggctgccactggctctcgtgagctttttaccctatgtgtgttagcactagctttaggtatcgcttacgcagcagtgacgctatttgatgcctctttcgcattaggcgctttctttgccggtatggtacttaatgagtctgacctcagccaccgagcagcacaagatactttacctctacgtgatgccttcgccgttctgttctttgtctctgtcggcatgctatttgatcctatggtattaattgagcatcctctaggcattttagccacacttgcgatcattattataggtaaatccttagcagccctagtgctcgttcgtatgtttgggcattcacgcagaaccgcattaaccatttcagccagtcttgcgcaaattggtgaatttgcctttattttagctggaatgggggttgcactaaatgttttagagccagatgcacgtaacttggttcttgccggcgccttagtctctattatgcttaatcctgttctcttctctttgttagaccgttatctagcaaaaacagaaaccaaagaagagcaagagcaacttcaacaagaagagatggaagaagagatgcctgtgcctgtcgatatttgtgggcatgccattatcgtcggttatggtcgtgcaggtagtatgctagctgaaaagctacaaccacaagctatcccattggtcattattgaaaatagccgtaataaatttgctgagttaaaagaaaaaggcttaaacgccgtactcggtaatgctatgaccaaagaatcgctggcattagcgcgtgttgattgtgctaaatcgctactactaactattcctaacggttatgaagcagcagatatcgcagaaacggcaagaaaaatgaaccctgatctcaatattatcgttcgtgctcattttgacgatattattgttcgtgctaactatgatgaagaagcttcctttattcttgagaaaggggcaaatcatgtgataatcgatgaagatcagaccgcttcagcaatggctgagatgctaatacaagaagtcgagttcggttgcgccattgatgacacacctgaagagggtcaacaaattattgcgcccaatgcagcgcaataatagagatttatttttaaaataaaggattaacaaactaaaaaagcaacacctttatcgcgtgttgctttttattttctctctttcacaaaagaagagcgcgacgacttaacttaacgttcccagtaagcttcttctaagctatcttctttttcaggcaaaccgcgagtcaaacgtggtgagtgttgacttaatacttgatagcttacacggttagcatatttacacacttgcgccaatgaagagtaagtcaaataactacgtgggtgtttactcgaattaggtacattaatgcgatgataactatttgccgtaatatcatgtaatagtgcagataatgccgcatcgccagcaccattggtattcatgattttttccggccctcccatataaggctctatatgcgaatagactttttccggcgtttggcaatctttaaaacgcatagcacggctaaactcgtaacgattaaattcagcaattgcacctggaagtaacggatgagtggtttggcgtttaaaatcactctctgtaaaacctgccatatacaaccctgcagggcctgcggtacataagactaaatcaacccactctaaagccgcatctgatgctaacaatggatcagcatgacctgtaagctctagggcttcatcttcattcattgccactacagagacatgctcttttaagaaatctctccaccactgaggatcgtcggcaatcacgtatttagtacctaatgttaagacaaccggtacatcatgctttttggcatattctatcgctttcatagttgccaacggcattggctctcccggtttgcaacggacgagataagcagttaaaactaatgccgatgcatctgcaatcacatcctcaggaatactttcgggctgaagttgattcatttgaccaggactgatagcaaaagtacgttcaccattttcagtaatgagggtaaagcaacgccctattgcaccatcaacaccttgtaaatagtttaaatcagtacggcttgaggtattacataagtagcgataagcataactaccaatctgaatattgttgcacatagtccccaataaaacagaacgatcatccgctaatacggagtagttatgtagtgtgttaccaatagtgccacccgcaaattcatgggtaataagattattaaccgttaattcgcgataaagggcttccgctacatcatcttcaataaccagagagtgtccctgactcaagttatagcgattgataaacgcttcatctaccttagcttcaatatcaactaatgtttggtcgatgccaacaatataagcccgagaagattcgctctcagtcatattgatgataggttttaataatggatctcgtaaactaacgggaaaatagtgtttggattttcttttgccagggaatttcattgtgaacgatgctacaagctaaaaaagatgcgcaatgttaacacaatattagtggagagacagtaggtgtacgtctgtacacctacttttatttgtggatatttacgctgttttacggcgatttcttgccatatagcccagtaaaacacccattacagaaaggataaaaccaacaaatgcggcaccgactaagattaatgcacgtttaggcgcatctttcttagttggttcataaggttttagcatatatttgaaaggaacaaattgcagatcacccaattttatttgttctaactgctggatattatataagcggttttttaattcagaactgaccgttgtaggatcagtaatcgcttctgttatcgctaatttactactaagtgcatcagcccccatggcaatggagtaatcaggatcatctttaatttgtgcgccttcactagaaataggctttttaactcccgcagcattggcaatttctagtgcatattttaagcgctgaacattaacattacgcgcattagcaatacgttctaaatccatttgatacgctttttgcgcatggtttaatttacgctcaatttgatcatcaatttcgtctttcacttctacccgtactttagtagaaataaagcgaatataacctgacagcaaatcgtaagcttcttcagaagttggcgcagtaaagcttaagttaatttcgccactaaattcttcatcactatttttactgtctgatgcttttaaattaatatctttagtaacaatagtttcgattaatttacgtttatccaatggcgtaggatcgtccatcttagccaataagtttttatagtaatccgtattgactaaatattcttcacgtaatacacgggaattgtagttattgataaatttttggtaaacagaagaagcatttacgccagtatcaacatcaaccaagcttaaatcatttaaggtagctcttaactgcttcatctcatctaacattggttttgtaatagcagcttggcttgtccatttctggggcagaaagctcgcaacagtaaaacctacgatagcaaataaaagtgtgatcccaataatgacaaattttgatttataaagaacagaaaataactcaaacagatcgatttcatcgttctgttttagataaaaatcgtcgaaatgccctttatcaacttctgaagattgtggttttgaaagcttactattcattttcctgcctaaatttgtgtaatgcagcgtccgtttatcagccattttagtgcacaagactaaaatggttaaaaaatgagaaaagataagtttatatataactgaaatatgatcaaatgaatatatcacctaatccgataatcgtatttagtgagcttatctattatttttcacatatgtcgcggattatagcttcaagtaagtcaatatgctcaactttatcattcaaagcaggaatgtattcatactgttttccaccaccatgtataaagaactcacggttctgttcattaatttcttctaatgtttctaaacagtctgatgaaaatccgggacaaataacctgtacatgttcaaccccttcactacccagtttttccatcgttttatcagtataaggtgataaccaaggctcacggccaaaacgtgactggaaagtcatcatcactttttctgctggataatcaagttgctgttttaatttttctactgtaaggcagcattcatcaaaatagatatccccagttttaataaatcgttctggaatgccatgaaatgaaagtactaaacgatccggcttaccatgttgcttgaaactctcgtcaatgctatttaccagcgctttaatataaagtggatgttgagcataactacgaacaaaatgcagtgaaggaatagttcgcatcgttttaaacagttggctaataccatcaaataccgcccccgatgtcgaacaagagtattgaggataaagaggtaatacaattaacttttcaacgccctgcgccaataatcgcgtcagtccttcgttgagggaaggattgccgtaacacatacctagttcaacaggtatatgcgcaaaacgttgtgctaacgctttttgctgtgcacggctatagactaaaagaggagagccgtctggcaaccaaatttgttggtataatttggccactttaggtgagcgaaatggcaaaataaccccatgaagaatgggtttccaaatccacggggaaacatcaacaacgcgaggatcgctaagaaactgagctaaatagcgcttcactgcatctggttgaggtgcatcaggggtgccaagattgaccaaaagaacgccgtatttagcatcattcataccaagactccttagagctgttttattaacataaccaaaagtaaaagagtaaaggaaaatagtgaactctgtttgtcaattaatcggattgtattctttttataaatattttgtaaaaaaaatcccggtctaaccgggattgctcttcggtgttatagattaaccgaggatgtttttcagttcagcattaatttcgcttactttctgtgtaccatcaattttgtggtactgcgcgttacccgctttagcttcattttggtaataagaaactaaaggtgctgtttgagaatgatattcgattaaacgtttacgcactgtttcttcttggtcatctttacgagttgttaactcttcacctgtcacatcgtcacggttttcaactttaggtggattaaatttaatgtgataaacacgacctgatggcgcgtgcactcgacgaccaacaatacgttcaacaataatttcatcaggtacagcaaattccagtacgaaatcaacattgatacccgcttctttcattgcatcagcttgtggaattgttcttgggaacccatccaacaagaaaccattacggcaatcgtcttgtttgatacgctctttcactaatgctattactaattcatcagtcactaattgaccgttatccatcaatgcttttgctttcagtcctaattccgtgcctgcgctaaccgcagcacgtaacatatcaccggttgaaatctgtgggataccatagttttctttaatgaattgagcctgagtgcctttaccagcgcctggagcgcctagtagaatgatacgcatcgcgtaaatccccttgcatttaattttttatagttaaactcgaaaacgcattaccataccattttgtgaggtcatcgctcaagaaatcacgttatcgattgcactttatttttatcgcaaaagaaaaaaaccacgctctcttgcgcaaagaacgtggtttaaatgattgaaaacgaatatggttacgcgtttttagctaatagttggttcactaaacgaataaactggtttggatcttctaaagttcctctttcagcaaatagcgcttgatcgagtaataaattgatccaatccgcgaactgtgtttcatcagtcaactcagccgtttgtttgactaatggatgattagggtttaactcaaagttgtatttaacttcggggacttgttgacctgcagccgcaaaaagttttgccatttgcgtactcatttcatccgcaccagtagtaacaatagcaggcgtgtccgttaaacgatgagttaatttcacctctttaactttatcacctagtaaggtttttacacgctcaacaaaaggtgccagttgtttatctgtctcctcctgctgcgcttgtttctcttcatcagccagtttatctaaagattcatctgctttgctcacagattggaatgatttaccatcgaattcagtgagatagttcatcatccactcatcaatgcgatcggatagcagtagaacttcaataccttttttacggaataattctagatgagggctatttttggccgcagcatagctatctgcagtgatgtaatagattttatcctgaccttcaaccatacgactcacgtaatctgccaatgaaacagtttgtgcatcgctgtcattatgagtagaagcaaagcgcagtaatttagcaatggcttcaatattagcgtgatcttctgcaggaccttcttttaacactaaaccgaactctttccagaaagtttgatactcttcaggattattgtcagccagtttctgtaacatttgtaatgcacgtttagttaatgcgctacgtaaattacgtgtcacagagctatcttgtaagatctcacgagaaacgttcaacggtaaatcgttagaatcgactaatccgcggataaaacgcaaatagttaggcataaactgttcagcttcgtccataataaagacgcgctgtacatacagttttaaaccatgttgatgttcacggttccataaatcccaaggtgctttagaaggaacatacagcaggctggtgtactcttgtttaccttcaacccggttatgtgcccagcacagcggatcagcaaaatcatgagaaagatgcttataaaattctttatattcatcatcactgatttctgacttattacgcgtccataacgcttgagctttatttattttttcccatgtaacggtgccgtcttcttcatttttagtttctatttcgacaggtagggaaatatgatcagagtatttgctgataatactacgcagacgccaatcatctaaatattcgtcttcaccttcacgtagatgcagggtaatttcggtaccacgatccgctttttcaatatcagcaaccgtataatcaccttcaccttgtgactcccagaaaacacctttatcagcaggttgccccgcggcacgggtacgtaccgtcactttgtctgccacaataaatgcggaataaaaaccgacaccaaactgaccaattaattggctatctttcgcttggtcttgtccaatagactctaaaaatgctttagtccctgatttcgcaatagtccctaaattatcaatcacttcatcgcgggtcatacctatgccgttatcactgatagtcagtgttcttttttctttatcagtggcaatgcggacatgaagttcaccctcattttcataaagagctgcatcggataatgcacgaaaacgtaacttatccgccgcatccgatgcattagaaatcaattcgcgaaggaaaatttctttattagagtaaagagaatggatcattaattgtagaagttgcttaacttcagactgaaatcctctcgtttcctgatctttcatactcatttttacctcaatttatcctaatttggcgaaaaaaatcgatatgacttaaaaggtggggatagttaagcaagtttcaagggagcagagcttaataacattaataaaaatactgaaatgccataaaggcaagcatgatataaagccattggcggtatgtagatcaccgcgataaatggttatcaccatcatgggctaaaatcgcttgtgcacctaaattcgcctcttcaatagcatgttttatggaatcggcatgagcaagcaccacgcctaaacgacgatgtcctgcgatttcaggtttagcaaataaacgaatttgtcgatttgccttaagcgctttttctaaccccgtatagacaatattagtactagacaactcaggtaaaatcaccgcggaagcacaagcacctaattggcgaataccaccgatgggatagcctaaaaaagcacgcacatggagcgcaaattctgataaatcttgtgaaattaaggtaacaagccctgtatcatgaggacgcggtgatacttcattaaaaaacacctcatcaccttggataaatagttccacaccaaataacccataaccgcccaaattctccactactttactggcgatatgttgtgctttggcaagggcaatatcactcattttttgtggttgccatgacgcacgataatcgcctttttcttgccgatgaccaataggctcgcaaaaatgaataccatcaatagcacgaatcgtgagtaatgttatctcaaaatcaaacgggatcatcttttcaacaatcacgcgcccttgccctgctcttcccccttcttgagaataagtccatgcactagtgagatcttgctctgaacgaataacactttgtccttttccagatgagctcatcaccggttttacaatgcaaggaaaaccaatctcaaccgccgcttttctaaaagccgcttcatcatcaacaaattgataaggagaagtcagtaagtgtaatgtttctgcagcgagacggcgtattccttccctatccatagtgagttttactgcacgggcacaaggtacaactttttgaccattattttctaattcgactaataatgaagtagcaatagcttcaatttcaggcaccaaaaaatcgggtttttcttgagttataatctgttttaatgcctcgctatcaagcatattgacgacataatggcgatgagcaacatgcattgccggcgcattggcatagcgatcaaccgcaatagtctcaatgccaagacgttggcattcaatgatcacctctttacctaattcgcctgcacctaataacatcacttttgtggcattagtggtcagagccgttcccaaaatggtcattttcgatccttatctcagtcagataatacgcattacgcaaacgtttgcatttggtggtagcataacggaatttaacaaagagaaaaatagccatagtaaaatttaaatactttatattttttggctatgctgacctttatgaatttttaaggcattaaggcgctttctaatcagcgcaaaaatacaacacaatagccctaaccaaatcaatgaaaaacttactcctttcacagcatcaaatgcttcatggaataggaatacggccagtaaaaattgcattgtcggttcaatatactgtgctaaaccaataacggttaaggtggttctttttattgctgcggtaaaaaacagtaaagggagaatagtcactggcgcggttaaaatataatagaaacgagttaaattgtctgcagaagaaaacgcactttcatctcgcataatcagccaaatcatcgcccctatagcgaccggaattagccacaaagtttcaataaataatgaagttatgacatcaaaacgaataaatttacgaatgagtccataaatcgcaaatgctcctcccatcacgagtgccagtatgggtaattgaccatacatccataattgatatcccactcctgcacaaattaatattaccgcccatttttcagcaggatttaatttctctttaagaaagataacgcccaatacaatagaaaaaagtggattaataaaataccccagactggcggctaagacttgttgatgcgtaagtgcataagtaaaggtgcaccaagagactgccattgctaatgaactaaataaacacataaaaatagagcgtctatcttggagaacagcacgccagcgagttctatttttaataaataatcgaaccagtaataacaggggaatagaccaaataagacgttgtgcaagtaactctaatggttgagcaccgggtaatagccgataaaaaagaggggttattccccataaaatataggagcaaatggctaataacacacctgactgagcccacatatgactttccaccaatagcgttaaagagaccttactatcatacgccgaaaacgaatcaaacaatatgatcatatccgctacttatcagcgtcaaagtaagcgattatcaaaataaaccactgagtaaaacataaaaaaaatctctataaataaagttgtataaaccttatttatagagatcacaaaaagaccagagcaaaggggaaaataggacttacaagcaaataaacaaataatccattaaaaaatatctcgtacatgtaacggcggttgtttactgacaaattcacgcaatacttttcggctcggtgctgcagcaatagcgccctttttagtggttgctaatgcgccacaggccgcggcttgcgtaataatttttaataaatattgttcatcatcagcaaaaccatattctgcaactgcggctaataatccagacataaaggcatcacctgcccctgtggtatcaacacaattgacggtaaaggcactcaaggcaacttgtgttgtaggcgtcaacactaaacatcctttagagccttgggtgatcacttttaaacgagcaggataatcagctaatttttttaatgcattttctaaggtaatttcctgagtcatccaagtcagttcatcttcagataatttcaaaatatctgctttatgagcatattcatcgatgatcgcacgcatttcttcatgatcacgccacatttgggggcgtaaattaatatcgaaactcagtaaagagtcgctattttttactttactaatagcactatctagcgtcgagcgacaaattggattaactaaagcaagtgaacaaaaatgtaaaatgtctttttcaaatacaggcagtgatttattggtaagaaattgatcagcagagtccgcaactaaaaaagtaaaatctcgttcgccattttcttgcaacgaaactaagactgtactggtacgatgtaactcatcaaattccattgtgctggtatctacaccgagatcaaataaggttttttgcataaagtgaccaaatgcatcttcaccgacccgaccaataaagccactttgctgtcctaattttgcaacacctgcagcgacattcactggtgctccaccagcacatgcttcatattgcatattttgcagtggaattaggtcaacaaccgcatcacctaaagaccagactttcataatctctcctgaagataagccactatttttattcactatattttatttttatcagtattaataactaaaaaaataaagatattgctcgaaaaaacatcctgataacgttaacataatggtgtacaataataaagataaattcaaacaacacgctttttaaccctaaatgttatcgctaataagggtgacatatagcttacagaataactgataaaatcaggataatgagatgaagcaacgtttagaacaatcgacaactgccctaaatgccttacaaaaaaaacgtggagagcaattttatcctcaattccatttagccgctcctgcgggatggcttaatgatcctaatggccttgtttatcataacggcttatatcatgcattttatcaacatcatcctttttctgaactttgggggccgatgcattggggacatgctaccagcaaagatatgatccactggcaacatcagccaatcgcccttgctccgggcaatgagtatgataaaagtggttgcttttccggatcagcggtaagtcatgaaggtaaattatacctcttttataccggccataactggttagcagaagaaggcgatgacagccaaatttaccaagcacaatgtgtggcagtcagtgaagatgggatccattttgaaaagaaaggcattatcttaccgccaccacaaggatatatgcactttcgtgatccaaaagtttggtttcaagaagggaaatggtggatggtagtcggtgcccgcgatgaaaaagaccaaggccaagtgttacttttctccaatgacaccctatttgaagaagggaaacaatggcgttcggagtacaaggtattaggcaaaaccgatgataaaaacgtctacatgtgggaatgccctgacttttttcctatcagtgatgataacgaatttgctcttgttttttcaccacaaggaaaacgcgctgaaggttatcaataccgtaatctgtttcaaaccggtgcactgatcggtcagtggtcaccaaaacaaccttttatcatacatggtcattttactgagcttgataatggtcatgactattatgctccacaatcttttgttactgctgatggtcgccgtgtttctatgggatggatggatatgtggaactcccctatgccttcgcaacaggagttttgggctggttgtttcacgcttcctcgtgaaattaactttgataaaagggcaaaccgtttacgtatgaccccgataaaagaagttgaaagtctaagacaaacaagaaatacgatagagatgaccacactcaataaccaagcgcttaaattactcgataagacaccggctattgagttaaatttaacctggtcattagatagccaagcggaaaaatttggattatggctaggaaaaggtttagaggtatttgtcgataatcaatcaaatcgctttgtgatccgtcgccattatccacaatataatatcagtggatcacgtagcacaccgttgccagtaggatgcgaaattaacttacgtatatttattgatcgctcatcaatagaggtttttatcaatcacggagagctgacctttagtagccgttattatgcagatgaaaatgatcgcgatttatcgctatttgccacagatggcagtgccacattaatcgccggtgaatattggacactatcaacgataagttgagcgttgtaatgtttctatactctctaacggaaagagagtctcgttacagagactctcgttcaattaactgacaggggacttgtactgttttattatgattacgctcttgaataatatgtaatgttgcttctttacctaagtcataatgtggcaactgtactgtggtgagtggcggatagaataactcccccgttcctatcatattgtcatagcctaatacagccacttgctcaggaatacgtaatcccatcgacagtaaaacttgataagccaaaaatgcgatacgatcattaccacagattaaaatatcaaaatctgctttttgctgacgacagtgttgttgtaacaatccaatcacatcacggtaatgttcatcgccaaataacattgtgtattgacgcaatgatgacaaaggtaagccggcatcttgccaagcatcttcgaccgctttacggcgaatagggcctgcaacggtatcttcgggtagataaaaacataacggatgccgataacctttttcaatcacgtgttttatcgcaaaatattgtccgtgataatcatcaggaatataggttggaaaagtttgatctttagctaggcagttggcaagtaccacatttttatcacgtagcttttcatgtaccgtgatttctcgcaatcccattgtggtatagatgataccatctggacgttgagctaacagttgccaaatggcttgatcatacccatcttgttcagtgaggtttacaacaaatgagctccagccaaactgacgagcggtacgctcgatggataaaatcatttccacggaaaaaggggtcgttgcggtatcaataccaagcacaccgatcgatgagaccttagtcccttgacctcgaatttttcgcgctgaaaaatcgggcacataattcagttcttcgattgcgcgttggacttgtttcaacgtatctggttttaataactcagggttattaatcgctcttgagactgtcatcaaagaaacagatgcaagtcgagcaacatctttcagtgacgccataatattggctcgattgggttgttaagtaaggtaattataaataatgctctattttacaataagtaaagagagaaatccacattctcaagaccatacaaatataagtatgacaaattattttagttaataaactaatcaaaaaacaattatcaatattaattatactcacactagatgtttaatatagttaaaaacacttacgataaaaaacttagttacaattaataacagttatatgaacttcgtttatagaagaaaaatatctttaacgataaaatagaaatattgaaacaaaacaaagttctgatattttatctataatataatgaaaaagtattaatacttttttatttaatatatccttattatggctccgttacgtgaatactactctacatagaaaatttataaattagtcaaatttcgttactcatttactcttgattaagagaggaataaaattgggagcaacatatggaatcgataatccatctgatcactttcgaagatgacagcacaaaagttcaacttaaagcagtgctttcttctttagcggcaaatgtgaaaacctattcaaatgaacaggcatttttaaagtactatttttcatcaactaaaggggctcataaagagtgcatcataattaacactaaaagtagtgcatcgccatcaattgcgttggtaaaagagttaaacaaattaaagaatatcattcctgttataattatttcgggagatgcatcgatagaaagttgccgtaacgcatttaaagcgggggctttcgaatatttaactcgccctttaaacgtcaatgagcttcttaatattgtgtcagaatcttttttacactatgaaagtgaggttgagcaattcagaacctatatttctttaaaagataagtttagtaaactatcaaatagagaaaaagaggtaatggagatgatccttgacggtaacaccagtaaagaagcagccgaaaagctctctttatcaccaagaacagtggaagttcatcgttcgaatatgtatacaaaactaaaaataagatcactaccacaactagtacaagaatatgatttctttaaaaaatatgacttaagagccaattaaatttagcccgtatatcttctttatcattagatgatatccagcgcttgtataacagcttaatcgactttcgtttcattattatttattaatgagagtaaactgtattgtaaaaatattctatttttgatgaataagtattgaatatggaaataataaatatactaagctccattctgcaacagaagggaaggctatcctattttgacgcctccctttcataagtcatacaaatactccaacctctaacctgaacaattagtatattttatttttataatcgctattattaataacgccctccctattcattgttaataatggcgaaacgataaaataaacactatttaatttgacataaatcatttttcacctcttacagacataactactattgacaatcaatttctgatttactgtcttattttttaactaaaaatattgctgattaaaaaagaacaaaaaaggaatcgctgtctcttttttatgtctagataaagtacagtaattgtctagtgactttaaattaatctatatttaccttatagaaaaaataattaaaataacaaaaaaatcataaacaacctcataaaatagctgatggatgtcataactctggttctttttagtctattatttagaaattaattctctttattgttgagctattttaatatataacaaattttttctactcacccacatcataataggaatatcattttaggaaaaaatgattacgtaaaaacaactaaacaaaaataagtattaacacctaaagaataagtattttttgtcgattgaatatttatcctagcttaatcaatgagcctacttttttattcacttataaaatttattagataatcttataatttgatcttcattttctttttacttaaacgtattatgctaataccttgtgtactcactaatatttttttgtaaaaaaaatgaataatgaagaaaaaaatcgtcgtcctataaaagcaagacaaaccaactgggcaactcgctgtagtcgctggctgcaaagcaaaggcgctacccccaatgggatctctttatttagtatcctattcgctgctatctccggtttgtttctctactttgctctcgctcactcccaaggcctacttcaatcaatccttcttattttaggtgcattagctatccagggtagacttatctgtaacctactcgatggtatggtcgcagttgaaggcggattaaaaagtcctgctggtgccgtttataacgaactaccagaccgaatagctgatacattgattattattggtgtaggttatggtttatccatcacttttcctatcgctattaccttaggctgggtagccgctttctttgcggtaatgacagcttatatccgtgtattaggtggtagttgtgggttagaacagcgttttacggggccaatggccaagcaacatagaatggcattattaaccggtattgccattatctctgcatttattcccgctgaatggggagcatggctctgtttagtctccctgtggatcattatcttcggctcagtacttactaccattttgagaactcgccaaattttacgcgatttaacacaaggagttgatgaatgaaaaatggcaaactctctttcgatgcaaaaatcatatcatcagtcttagtctctatctgtcgttttttaaccgggatcagagccaaacaaatatctccgattgagaaagataaaccttgtatttattacgcaaatcactcaagtcatctagatggtttagttatttggtcttcacttgccccccatattcgcccatttgtgcaccctgttgctgcagaagattattggaataaaaaccgtttacgtcgttatctttctcgtcgtatctttcgtgcagttttgatcccacgccacgcgaataaaacaaatgttactgaaggaaatggtgaaacaacaactgcacctcagaaagtaaatgctcttacactgatgcaggctgttttagataaaggtgaatcgctaattattttccctgaagggacaagaggtaacggtgagtctattcaggattttaaagccggtctttggcatttgtcccgtaacaatccacaggctcaattagtccctatctatcttgaaaacttaaaccgcgtacttcctaaaggctctcggcttgtcgttcctatcatttgtagtgccacatttggcccgcctattgagccgacacatgaaaatgaagataagactgaatttctattaagagccaaaagtgcgttagaggagttacatcatggatagtatcaacaatgaaattctctggatctttatcgggctattctcctttttaattattgccagtattattggtgcgatccttgcggcactcaaaggtcctacctcaaccattaccaatcttaattctcgaattaaagcttggtggatcatgtgtatcatttctgccgtcgctattagtattggaacaataggctcagttatcctcttcgccttaatttcatggcttgcattacgtgaattggttacattaaccccgactcatcgaggtgatcacgaagcacttttttggtgtttctttgtcgtgctacctatccaatatattctcgtcggtgtgcaatggtataatttgctagccatctttattccggtttatgccttcttattaattccaacacgtatggcgctttccggagatactcatcactttctcgagcgcatggcaaaagtgcaatggagtgtcatgatagctatctattgccttagctacgctccagcattattaatgttaccgatagaaggctttgaaggacgtaatattaacttattactgtttttgatgatcgtggtacagacttctgatgttttacaatatgtgtttggtaaactatttggcaaacatcctatcgtaccgaaattaagtcctaataaaaccatcgaaggtttctttggcggcattatttcagccagccttatagggatgatgttatggtgggcaacgcctttcacatggtgggctgcttttttactctctttagtcatcacactcgcaggctttgctggcggtttatgtatgtcagccataaaaagagatagtggcgtaaaagatttcggtactatgattgaaggccacggcggtatgatggatagaatggattctttgtgctttgccgcccctattttcttccacgttattcgctatttctacgtgtaattcccttttgaataaatgctggtaatctgcaaaattattaccagcatttctataaataaatcatcgagttattatcgtcaatgtaattaatcgcttgttttaactcaattaaaaatacctatacttaagctttatttttataaatcaacatattaaataagaataatcccatactcgaaatccgaccacttctttttttaacttattgtcatagatcacattattactatcttttaatctagcgtttcctttttatttttttgtagataattatgatcacttggttacttcttgctttatctttattgttattagggttccatcgcaaacttgcacttactactttagctataaccaccattagcgcatttataacaggtgttatcacttggtatgtacttccggttatattgagcttgattttactctcttgtgcatatcgccattacaaaacaaatcgtcttattgccactattgttattcttgcatttatcgccattattgttgggttaacttttcattttattcctggttttaataacttacgctacattaaacatgttccattagggcaatatagcccccctttctctttttatttcaatgccgataaagcattaatcccttttattttaatgatttttattcctacattatttaaaacagagccagtaaaaaaagccaataaatatcaatgggttttactggctatggcgatccccgcactgttattattcgcaatggcattgggtggactcgctattgaattacatttgccacaatggctacccgcctttatgttagcaaatattttctttgtctctcttgctgaagaagcactatttagaggagccatacagcaaagtctatctcgctatttatctccctatcttgcgctatttattaccgctattttatttgggttagtccattttgccggggggatattactcattatcttcgcctcattggcaggtattatttatggcttagcgtggatgtggagcggtaggctttgggttgctacactctttcattttgcactgaatctcactcacctgctctttttcacttacccttttaaaatcgcgtaagtgctatattattctgctgtattttaagttttagtctttccgtctctttactcgtttaatactaatacgagtaaagaggatgggtgaaacgtgaaagcagtcacactattaacttatcgatcatcttaattttcccatcattagctgaaattttttgttagtatgccctttatcgcttatctataaataacaaaaattttatacaacatataataacaaataagccaaaataacagcgattgacagcataaaaaatacccactattgcactgtgataggtatccatcacacaaaaatagattatttttaccatacacattatgtgacttttacctctttcaccatcaggaaaaagaatatgttagatcaagagatgatccgtacttttattcaagtagcagattgccaaagctttactaaagcggcggagatgttacacaaaacatctgcggccatcagctatcggatcaaaaccctagaagagaatattggtacacagttgtttaatcgtacgacaagaaccgtcacattaacgccggcaggggaatatttattagagaaatgtcgccagtggattgtttggcttgaatcaatgcctatcgagctacagcagatgaatgcgggagttgagcaccaagttaatattgttattaataacttactctatgatcgtaccgccgtggccagtatgttagcctgcctgcaccagcgttttccttctacccaatttcatattactcgacaagtttatatgggagtatgggacgcgttaattaatgaagattaccattttgccattggtgtcacaggtaatgaatcactgaaaaataatattaatatttgtgctatgggggaaattcaatggcaatttgtcgtggcaccaaatcatccattagccaatgttagtggggtattaagtgatgatcaaatgcggatatactctgccgtcaatgttgaagatacttcacgccatctttccaaacgcaccgcttggcgtctatctggacaacatgaaattaaagtgcctgatttacatactaaactagcatgtcatttaaaaggtgtcgggatcggttttttaccattaagtctatgtaagccactgattgatagtggacaacttattgcaaaggaagtgaaaaatcgtcgccataattctcccctatcactagcttggtgcgaagataaaaaaggtgccgttgtcagctatctggttgatttgttccgacaagggcatcccagtgtgcaatctttttacgatccccttaactaaaaaaggcaaaccgaagtttgcccttgttgataacattaaacttaatgcgttagttggtcgctgtggcgtcaggattttctttaataaataagcttgccacaatacctatgcaaatcaggatagcagcaaaatagaagccggaatccatacttcctgttttatctgataaaaaacccgttaatgtaggggcaaatactgaacctagcataccaatacagttatacacaccaaaagatgtccctaatgcatggcgtggtgaattatctgccactaccgccactaatactggattagtactaattttccctacgatcccgtataagatcagtgcaccaatcagtaccggcatagaatctgacataggtacagcaagaatagccactaaagataacggtaacataattaatagcacaggcttacgacggcctaatttatcagagaaccagctaaataagagtgagccaggaatagcaaaccaaggcatgagtgatgctatggtagagatctgtgttcctgtaataccacgctcggtttcaagataatagggtaaccaagtgactaaaacaaagaacccatagattgaacagaagatagtaatataagcaaggttaatattacggttaccaaataaatctttaaacgtcagttttgttttctgttttggtgcattaggagccgtatccgtagctttcgttttaggtttatcttttattatccataacatcatcaaaccaatgataataataggtaccccaataatatagaatggtgcacgccagctcatccccatctcaccgacagaaatactagagatgtagtaaccgatggataaaccaaacgccataccactattgataatggcactacctagcgtaatacgatgttttggaatagcttctgaagataaaccatattgtggaccataatagaatccttggaataccccgaccatcacccatgcaaacataaaggtgacataagttggcatcatccctgcgataatggtaaatccaccaaagagcacaacccccgtgactaagacttttttcttacctaaatagtcaccaattatgcctgatggaatgttcagtgctgtataaccaataaagaaaatactcataattgagccaagttgcgctttggtaagatcaaactcagcaccaatattcaccattaaaggaccgacaatggcacggctaccatacagtgcaatccaaccaaaaaagaaaataatcgtcagcttgacccaataagggactttgcctttactctcattcacttgtgcatcgttcataatgacgctcctgacagaatgttattaagacttataaattaaagtgccagactgaccttcaataacctgttgaatgttttgtaatgcgccaatatgagcttgttgtcctgtggcatttacaaaatcactgacagccatgatttttggtcccattgcgccatcagcgactgccattggtgcaagttcttctggtgttgcttcacgaatagcagcttgttctggtgttccccaatttttataaatggcatcagcctctgttaaaataacaaagtgctctgcatttaactcacgagaaattaaagctgctgttaaatctttatctataacggcttcactaccaataaattcattatttatattattaactggaatacctcctccaccgccacaaataacaatatgacctttatctaataaaagctttactgcctctatatcaattattttttgaggtgctggtgaaggtacgacacggcgataatattgcccatcttttttaaatgtccattgatatttatttattaattcttctttttctgcttcctcataaataggaccaataaatttactcggctctctaaaagcctcatcattaatatcaacagaaacacgagtcattactgtagtaattgcttgcgtaggattattttgattaattttctgcatcatcatataaccaatcatcccctggctttccgcgaccaagatatccaacggataggctggaaccgcttgataagcaagattttgtaatgctaacaacccaacctgaggcccattaccatgtactaaaacaacacggtactcttgcgctaatttattaattgtctctgacattaattcaatatttttatattgattttcagcagataaaacttcgccacgctgtaataatgcatttccgcctaaagcaataacaattgttttcataattatccgtttccgaacgtttataatttctttttaataaaaaagattaatctatacgctgttgttgtttaatttgataaccaatccataatcccagtaaagtatctgcaccggaatgatgaccgatagagagtatttccaacatatctttaaaaataatctctttattttttatttttttacctagttgaataagataggtagaaaatattccccgtgtggcgtattccaaataatgttgactcactatcgtagttaatgacgataatggtggtgtttcattaaaaaaatgttcaatcgatttttctggctctgctaaataatgcgcaaataacattcccaccagcatatcatctgaactcggtgttaaccctggacctttaccaataaacatcgcccaattaaccgcttttccagacaattgatgataaaataactttgttaataacttaatttcatcaagtcgggcgatttgacgatagttttttaatggcccatagagtcctgtcgctatcaccggagataatagagaaaaaaaactctctaaccatcgtaaatctaatgtcgctttatcttgtaaacgcaaattttcactatcaccggcaatcaatgtcatattatctgcgattgcgatttgattgtttttcatccgcattttcaaagcgggatgacactgcttagccaaagaatcaaaatcggcttgtttcagtagccaccccatcgggcttaatcctcttccttgccgatgaaaagtgattaagcgttgctgagggcaaataaaattcaaagcatgttcataaatgccgacacatttaaactcaccttcaaaagcaaagatatgctgactggtttgaagtgcttgaatttgcatattgccccctgacgaccgtgttattacaaaacgtgattaagcttcaatgcctaattcttctgctaatgccactatcgctttttcaaaacagcctaaaggtgcacgtaccgttcctgcgccaatttgcccaacccccggctctttatgagcaatacccgtattaattagcggtgtaatacccgtttcaacaactcgacgagcatctaaacctaaacacgcaccttggaaatcccaagtcggtatttgtagcatcatattacgagcaaggtagatttcagccatctcttctgtcacttcacgtgctgcatccataccacccgatgctccgacaaagcgggttactcccggagctgcaaccattgctgcaccaccaataccgaaagtttcagtaatagcactatcaccaatatcagggttggcatctgcttggctaaaaccagagaagaataatccttgtggcgtattaacaggtgctgtaaaccattgatcacccataccacttattttgatgccaaaattactaccattacgtgtcattaccgtcacaatcgtaccttgcttaatttgtgctcctgcgtccatcgccgctttacaataagccatggctaaattaaggaagaattggtcagtaatactgaggaatttggtcactttagttatctcagccgcatctaaatccaatgtgctaagaattggcgccagctctcgtaacaatagtgcagaagctgcaatattacgttggtggaattcatcccccatcgtaatggcttgacccataattgccgtaaggtctatcccattctcaatggtggctaaagctgcttttaataccggagctaagctattacgcatccaatgcaaacgttcttgtacatcaggaccataagcaccaaaacgcatcactttaccaataccttcgttcatattgcagtaagcatagttaccgtgaacatggtttttaatcactagcattggcatatgagcagaagtaataccgcccatcggccctacggcattgacattatggcaaggaataaactcaatctctcccgcctctaacatagccaaggcttgtgcttcattttcagcccaaccttcaaataagctagcaccaatacaggcgccacggacagggccactcatttcttgccaagttacaggaggtcccgcatgcagtaatttttttcctgttgctaacgttggcactacttcttttgctaaactcacatcacaccagtgaggacgggcttcacggatacgttcgataactgcttcattcgcttgttcgatagttgagtacatatctgcaattccttatttcaatttctttaatatttcagccagttttttattaccacctgcgacaggtgcccattgataatgaacaacaggcgtaccactggattgcagatcgtcagcaaaactgcgtaatccggcgttgatcacggagatcccatttaaaagtggtgaaatttcagcagcggcttctactggatgtggctggattaattctttggctaacagtacgacttctggcaaggtatccatcacaataatacctgcatcttgtagctgtttttgttgctcactacggttttgaggatcttcctgcgtaccggtaatagtggcgatagtaatcagtggattagcttcaccacgtttttcatttaattttttaatttcttgaattaatgcacctgctggatctgacgttgcaccataaccaatcacaaagtcgaccagtaatacgccaatatcatgcttattacttaattcactaataaatttattgcgagtagaaggatctatcattggatggggtttgccttgggtataaaaatcatcgcccatatcaataattttatgcccttgtgcatcgagcatcgtaccttgcttatgttcgttatctaccgccacattgagttgctcagataacaacatcgcgcattctgccgctaatgttccacccgcatataatccaataatctttttacctgccactttgggtaactgagcagcactatcttcaacacgtgctaacgtagccgcaatacgcgccgtttcgtctaaggtgcgagtaaaatagatattatcgtcttgatatttctctggtgttgttcctaagaattgcgccactatcggtttattatgacgcttcatttctgcaataattttttcacgtactgcaggcgcgggaggtttagaaacaaaagcaatcacacgggtttgaggatctgccgccagcatattaatagccgtgatagcactaatgccaccaatttgctcgctgagatctcgtccccccagacctattgcatgagaaaccccttggcgttgtaatacaatttgtgaggtgatctcttgaattcctgtccctgatgcaccaacgataccaatagagcctttcggtgcaatgttagcaaaggctaaaggtgcgccagcaatatttgccgtaccacagtcaggccccatgactatcaatccgttagcggcggctttttcttttaatgctttttcatcagcaatagagacgttatcggaaaatagcatcacattacagccatcttctaatcccgtatcagctaattctgcagcatactcaccggcaatagaaataagcaacatattagcgttaggacttttttgtttagccgtacgccagctacgtacagtggttaatttattaccacttttttgaccgttagcaatatcagctaaggcttcttctaacgcactggagatagtctcgataatagcgggatcgtctgattcagctttaatcgaaacacagatatcattaggtgtcgcttcgttaaaaatgtcatgccaaaaaccggtgacatcaaggagagatttattcgctggtgttcccatcatgacggaaatttcttccacctcaggggcttcacttaattttcgggaaattatcatcaggctgacggaatcctgaaagctcccttttttaataaaagcatggatcattataatatccttaacgcatttaatatatgtaactgcacatatctagttgcatttcgtttttttgataataagaagcctatttacttaatagcttaagtaatataaataaaattcgagatagacatgtttgaaactctgtatacaaacatactgaataaatatcaaaaagtagagtgattaaagtcacagttatttattgtaaaaaatttttatttaatcagtcgctatttattaaataaattataatgagtggaatgagtaaaaataaaaaaacaacagattgagtaaattaatttatataaaataaattaatcatatagttagccataccaaatggtatgacaaatcaaggaatttataataaatttaacaaacaagtaacataacgcagttagccgatattatcaacaaataaaaagcactttattaataaacaaagtgccttaaataattttcatataaataaacataagtctacattttacttttacacccttgctaaaaataatattattgaaaaaaagcaaaaataatgcctataaaaataatatttataggcattttaaaattaataagttttaaataaattcaagaacaaattaacgttgtgaatctaaagtttcattattctttataacatcttgagctttactataactttcaattaataactgataagcagggaatatttgggtataagcttgagcccattcagcggcatctgcacggttccaagttttttgcatttcagaagccactgctgccgtatccataggcacaacaccggcttgaacaatacgtgctaaggtaatttcttctgccattttgctatacgttcctgatgcatcaatcacagcaaaaacttgataaccttcagcaacagcactaattgctgggaacgccatgcaaacactcgtaatagtaccagcaataattaattgctttttacccgttgctttcacagcttcaacaaactcagggttatcccatgcgttaatttcacctttacgggcaacatatttagcatgtggtgcattttgatgaatttctggaattaatgggccattaggaccttgagggacagaagccgttgtaataactggcatcttcgctaatgttgccatttttgctaataccgcagcacgagcacgtaattccgtcattggcatatcgccaacggtttggaataaaccactttggtgatcgatcaataacataacagcatcatctggattaataactggacgttgaccattgaaatttgcaggagtactcatttatttattccttctaattaacaaaaacgattattaacaatatgaagaagatataaggaaatagcgttaattatctcctcgctctcgatataattaacaatagtcaattaattaaaaagtcggtagtagcaataatgataaacactattctaaaaatagaacactgaaacacttttgtcattgttctatttttagaataatgaaacctattttcccctctactcaaatcaatatagctcattagaataccacctatagaaattttataggaatatcattatgaaaaaaattattggtgtttataaagcgcctcgtcaacattgggtcggtgatggcttccatgtacgctcactatttagttatggtgatcatggtaaatatttaaatccatttttattattagacagagccggcccgactgatttccctgcctctcaaggccataaccgtggtgtaggcgaacaccctcaccgtgggtttgagactgtgactattgtctataaaggggaagtggcacatcacgattctacaggtgaaggaggagtgattggccctggagatgtacaatggatgaccgcagcatcaggtatattacatcaagagtatcactctgatgcctttaaccaagcgggaggcatacttgatatggtgcagttatgggtaaacctcccatctcatgctaaatcagcgcctgctggctatcagttactcaaagagagtgctattccagtgcttccattagcgaatgatgccggacaactgcgcgtgattgcgggggaatatcatcaaactcaaggggcggcaaaaaccttttcacctgttgacgtttgggatattcaattgaaaagtggtaaatctacgaccttaccaagcaaaaaagatcgctatgtgggattagtgatactccatggtagcgcctatcttgatagccaaactcaattaaatacgggcgatttggttattttagataatcaaggtggctcaattaatcttgaagccattgaagatgcgattgtgttatatcttagcggagagccaattaatgagcctgtagttggttatggtccatttgtgatgaacagcaaagatgaaattaggcaagctattgatgactttaaccaaggtaaatttggtcgtatcccaaacgaaatatgattaatactctccttgctctataacttttataacaaacggctgctcacttagagcagtcgtttgtatctattttttactctttatatggagccatattctgcgctaaataatctaataacacttgaatagcgggtaataaaccttttcgtgacggatacacggcatgaataacatctttaggaaaacgccactgtggtaagacttccaccaaagagccatctgctaactctttctctacgacactcaatggtaaacgcgtgatcccaagtccctttaatgttgctttatataaggtcatcacatccgttgtcgctaatttaggtgtaacatgttgcgttgaaacagtaccatcattatgggtaagcgttagcgtatactgctgcgaatgttcgctattagctaaaataggataatcagcaagttgctctggagaatcaggcgcactgttggttgcaaataatagcggattagcaaccaaaacacggcgagaataacctaatattttcatcgttaagccagaatcatccaaaggtaatgctctaactcgtaaagctaagtcaagaccttcactgatcacatccacagggcgattgatcgctaaaatttgtatattgatatcaggatattttgccataaaatccaccaaaatatcttgaatataaatttgcagtaatgcaactgggcaagagagtttgatcgtgccgtgaggatgcccctgtgctgaacaaataacctcttgagcaatctccgcttgttcaacgacatttttacactgttggtaaaaagtttgccctatcttagtgacatgaaattgacgagttgaacgatagatcagcgagacctttagtctctcttctaaatcagcaatacgacgactaagttttgatttaggaatacctaacgtttcggccgcttgtgaaaaaccgccaaactccaccactttaacaaaataatagaggtcatttagatcatacttcatcgcctattacctatttaattgtcattatataaaaactgaattgtttcagcttcggaaattatgatacatatattatgatctattttcacgctaataatatattataggctgatattttagtaaaataaaaataaccattaattatagcaatataatataaataaaaatggagattattttaattctgtgatgcttatttttaattacataacacaataaaaaataaaaaaacagggatagttaaaaagattattactatttaaattaatttaacacaaaacaactagcctgagtaaacaataaatcacctaaacaataatgactataaaacaaatagttatttaaaaacttaattacaaaccaagatgttaagatttaattttatttttatgatattaatcaatgtatatttaaaaatatgttaataagattataattaataaaaatacttatttacataatctgtcacttacaattatttcttacacctgtttttaatggaataacctgatgaataaattaactccattacgacctatgcctaccttaattgcggttgctattacccttatcatttggtttgttatccctgttccccaaggggtagatcccaatgcttggcacttgttagcgctgtttgttggtactattgcggctattatcggcaaagccttacctataggggcagtatccattattgctattgcgcttgttgccgcaacaggcgtcactaacccagactcaactaaaggggcgattaatgatgcattaagtggcttttccaacaatcttatctggttaatcggtatttctattatggtttcaatgagtcttaataaaaccggattaggtgctagaattggttactattttatttcgttatttggtaaaaaaaccattggtatcgcttattccctagctattgcagaaacgatcctcgcccctgttactccaagtaatacagctcgaggtggcgggattattcacccaataatgcgatctattgccgatagctttaattcaaaacccgaagagggtactagtggtaagattggtcgttatttatcgctagtcaattataatatcaatcctatcacctcagcgatgtttattactgcaaccgcgcctaatcctcttattgtaagcttaattatcggtgaaacagggtctgaaaatgagttaacttggtcaatgtgggcaatagcggcttttgttcccgccattgtttcattatttttaatgccgattgtgatctactttttatataaaccagagataacccatacgccgaatgctccccactttgccaaagagcgtttagctcaattaggccctatttcattgccagaaaaaatcactttgggagtatttgcactgttattaattatgtgggcaggaatacccgcactattatttggtgatgcttttagtattaatgcgactactgcggcttttattggtttatcaatcttattatgtactggcgtattaaattgggatgatattttaaaaaacaaaggtgcatgggataccgtggtttggttttccgcattagtaatgatggcctcttttttaggaaaattaggtctaattaaatggctctcattaagtgtgggtgccggtattgatagtatggggataagctgggtaagtggtatgatattactcgtgctgatttatgtctattctcactatttctttgctagcaccacggctcatattaccgccatgtttgctgcattctatgccgcaggtttagctcttggcgcgccaccaatgttattaggacttattttagctttctcttcttcattaatgatgtctttaactcattacggtacaggtactgcaccgattattttcggctcaggctacgcgaccttaggtgagtggtggaaagcaggttttgttatgagcattgttaacctcattatctggataacccttggtagtttatggtggaaggtgctggggtattggtaaaataataaaaaccaaaatatgatgcctaatcagtctgttaggcatcatattaactagcgccaaagttcacacttttcgacaatcgtctcagaatgataataactttctttataggctattccttcttgatcaaaacaatcatttatatcctgaaaaaaataatttaatttaactttaaaaatataagataataagtaaattacatccacatgaatattgcactccccattttcaaagcgtgattgatgttgctggcttactcctaataaagcaccaagctcactacccgtcataccatgttgttgtcttaacatttttattcttgcgccaactatctttgatatttttttattcataatcgcctcgaatgacaaaaccatatcgaaaaatatattattatcactcatataagatatttactgttgctgttgagttagcactacctggcgttattttattacctgtttttatatatcttgctttccaaccaaatatataatcaccggaggagaccccattttgtagactattttttgtatttagttttatcgggttattgtttttatctaataactgaatggcaacaccagtggctcgattagtgcccgataagtttaatttccctgtatttacatctatatatccagcactacttgtcactgtcgctttaatgttagtgccagccgcacagtttaatgtaataggaatatctacacttttactgacatcaccaatatttttaaattgagtatcataccaaatccccatattaatattataatttgatgattttgtagtacattttaatgaatttatctttattgcattaagaggcaaataaagtgaagttaagttccaagttgtgtttttaggttgtgtattattttgtactgcttgagcaatcttgccccattgaaggcttcctgattgcgttactctgcctgttttcattatataaactgtccaattcgggtattcaaataaatatgagttgtgtgttccatcgcctttcttagaccaagtggtgtttaacgcgccaaatttattgaaataaacttgaattcctataccagggatatttgtctgtactattttctcagcatttggtacccatccattagtataatttgccgaaattatagagttaccacatttcccatcattacctgaaaaagtttttataggtcctgctctataattaattataatcttatctaatatacctgtgcgcatatcatcatattgaagtgtataaactttattgggtatattaacccaaatattttttaaattaggattttgaatacaagccgcaaaggagttagctgagaaaaacaataatgtagctaataaaaaaatttttttatttattaaatgattcatttttattccctattatatttgatattttattttctatttctactttatcttcatcatctaattgaaaaagatcacttaaactaataccgaaaaagcaagcatattgataaagcctatctagactcactcgattaattccccgttcatatcttgattgctgctgttgacttatacctattttcttagccaattcacttaatgtgaggccattaaccctacggtaataagcgattttttttcctaccatctttgatgctggataagagcgattcacttgaaacccctttatgacacatttaattataaataagagtaaattcaagatggctcttaaatgatcccaccgttatattatttccatagccaaccattcttgccgataaagcaaattccgcattatggttatatttattaacagccgtcattaatttatcattattttttacaatacctttattattttgcattgctaaatttagtgctatatctttagcagtcccactattaataaaatattccgaataattaggaacactttggcctcttaaaatcatagtgactttctctgtattaactgggcaattttttaattttatagaaaaatctatccagtctgatgcttgaccatttttaatatttctaatattgattttttttaaatcaattaagtggtttttcgtttctaactcacaaggtgaggctactactgatccatatacattaatattaacagtgttgcttaatgcgataggagaatatgaaaataataaaaataacgttagtgatttccacataacaccctctttttattgataaataagcgttgctgttattttggcggacaccgtccccggtgttgcattacctaatttactaaatgctcgtgttcttagtggaacagtaaccgatggtttaccattaaccgcgatatataaattttttccattacctaatggaatttcgccattactgtttttattttgtaattgaacggcaatattttttgccgtcccctcatttttatataaattattcacatctgcattatcaggagttccagaaaaagtcagctttacttgatttacccccggagaacaatctattaacttaatattaaaatcattccaaacagaactagagtttactttattaaataaactttctggcatctgtttcaaatcaatattaatatttttactaccagaaacattacaagtcgcggcttttatatttccagaaaattgaagtgtcacagtacttcctgcagatgaaaaaaaacttattccaatagtagttataagaaggaagagcctcattacttttatcattttactttcctacaggtagcaaacatcaatagctataaaaataaccatgtttgatatttaaattaattaatagcaagttacagtagttttatagagccctaaataatctggaatatcagatagatcataatttacctgacagctttcattgttgtatttaatagtaaagtttcctttctgttttagccctgataaataaacttctccatcattacctacaatactatttaactgactattgtctttaaaaatagcttgagcgccaaatggtactggctttttgttttccaaatttatcgtcattaatacacgatagcctacatttgctgaaaaattcgcttttactaaagcccctcgactcggtaaaaccgtctgactggtaagttccatttcagcattctctggcaatcttaatgtatcgatctcgacagtatttttacgatatggtgtgacataaggaactaatgcataccctgagttattagtcctaactcccgcttgatttaatatcgtaatatcacccgcattaggaatatctacgattgccgcggtttctcccagttgctgtccaaaaacaactccctgagaatgagcaacgacgctaccgctcacaccatagtaaagattatgattatctttgctataactgtacccccccgtaatatcacctagttggcctttgtaggatgcattgatatttccagaagatccttgatcttgattggtaaatgcttgttgcacactccaatttagtcgattatttaactgagatgccgatatacctacacttcctgtacttgaactattattgttactattcgcattaaaattataataaaaagtattatcaaatacgctaaagggcacattcaccgaaaaagccaacaaatgttcatcatcattttgtcttttctgatcagcaatataagaatgattaactgtatttttattgtaggtataatttattccatagctgataccttgccagctattattataaccaagtgttgctgattgttttttgcttttgctgttccaataatcctcttgtatatatccgatagctaaagagccatatttatcacctaaattttgattaagtgttatctccgcacgatgacggcgttgctcaatttcagggctataatgagtacgacgaaaactatcaaacacttcagataaactataaaagccactcgttgaatagcgataacctgctaaagcaatattggttcctatattgttcaaattcttattatatctaaaccgataagactgaccttgttgcttccttccatcattaaaagttgacttagcctgtgtaacatcaacagaaacagcaccaaatgagcctaaattcttcccaacacctagggagtaagattgataattttgactcaactgacttcccccataagcagtagtgccataaggtaaaccataaactaatgtaaactgaccaaacttcgttttatctacattattatcataagcacgatattcaccgcccgttacgctataagtgaaatgaccttcacgctgtaatacaggtaaagaggcgaaaggtacgatttgatgttgctcactaccattagcacccttaatcgtaacgtataaatccccactactacctgatggatataaatcattaatttcaaaagggccagctgccacttcagtttgataaatagtatatccattttgtttgatagttatttgcgagttactttttgcaatccctctaatgataggcgcatagcctcttaaactttctggatacatctcatcatctgttgataattgcatgcctcgaaacggaacactatcaaaaacatcagatgaagatatcccatcccctagtattaactgactttttattttatttatattcctagataaataggtataaagggtgttccacttccctgattgattacttgtactcgaccatgttgtgtagtttcttaaacgccatggtcctaaatttaaacctggtcttaaatttatataatttgaagttgtatttgaactgccattcttacgatcatagtttttagaaccactataactatagtttagtaataaggcatttataccattatcaatattatctaactctatatatcctcttgggtttttagataatgcaatttgcggaatacttaaatataacctttgtgaatcaaaatctaattcacttttagcttctggtatcgcagacaaattgacacagctagtatattcagaataaagcccaggataatctgttgttttaaccccaaagtcatttagatcatttactgataaacaaggtttaagctgattatttttatctttatcaaatctaatatttttagttaaaattaaattagtgttaacataaatatcaacataatagtcacctgctagctgttggttattctcaaaagaagataaatcaataatatctttatttggcagctctaaaaaatctggatcaaaatagatatcatctaaattattattttctgcatataataaagctgcatagcctaagtataaaatgaggctaatacataccttacttattttcatattagaaacctaattattatattctaacttcggataaatccacattagccccataatcattaataagctcccagcttataagaccatgttcattattatcatttatatcaaatgatttagttgaaaaaggtttagcataagaaacatcatcaaccaattttccattaaattttattgtttgaaaattcataaaataaggtgtgggattataaactatgactttccctctttcctttgaccaagataatttcttttgttcttcttcaaaattaacgtcttttagacttttaggtctatagatcaatttcatttgcgttttaaatgcaatttgtaatgaattttctgttttttctgtagcagggatcgtttttatatttaaccaaaaaagagattcttgatcacttggtagcccttcttctgttaaaaagatcctcaatgtattctctttatctggattcaatctaaataaaggtggcgtgatcgtaaattttgactgttttttttcctcaaaatcatctatccatgactggatcaaataaggcattttatctgggtttttcacgttaatgctgacattcttattgccttcattataaattacccttgtgccactaataataacacctgcataagatgtattaataataaataaagaaataaaaaatagaataatagacttcatattatcaccataaaatgattgtataataaggtttaaatccctttaaaccttatgacttacctagttatttttaattataattaatagtaaatgttgcattcgcatttgctaaacccgcagtgacagaatctgttttagcaatataacgagctctaaagtctaaattattttcaacaccttcttttaatggataagttttagatgcggtaaataaagggacaacagtatttgcatcatccgtaatttgaataccgacacctgttgccactcccgactcttgttttagcgcaataacagtatcgtctccagaataagactctgcatcaaatttaacagatgcagtacttactgttgcagggcaattaattaatttaatcgtaaatttagttgccgcagcagtaactccggcactaggtaatgctgttttagataccttacctaaattaacttttagagcatcagatccagctgctaattcacatgcgttatcgataatttctcctgtaaaatcgattgttccatctgcagctaatgcattattcgcgacaaaaatagacgttgtagcaatcaacattgcaataaagctttttctcatttatttctccaaataattattttaaacacattgagataatagaaataagattaattaactcaatacgcgagtattatctatttattatttgaaataaacaagtttcggttattacagtataatgttgataacattttaatattaaatagtgttattaactaataaaacacagtataagttaaacaatattttttacttttaataaatcttatttttaataatttgaaacaaaaataaaaacaaaaataaaaataaaatttttcttttttaaataaaatatttttttgtttttttttataactcatatagtgttaatcgtatattaatgttcaataaaaatgagttttctgattaaaataaaataaattctagctgtatataagctctaaatgcttatttaagcaacactatggctaaaaaacatcaatactatattctaaatacctgtataagttagtgatttactctaaagaaaagctaagaattttttcaaatttatataaaaagcattatttatcacaaaaatcacagttcgattgttttccaaccaaaaaaatatttactattcatctttaatgataaaaatcaaaaaccatgctttgtaaaaggaaatactttggtgtaaaactaaatttagtttttacttatatcgcattaagcaaaattttctgccacgtatctattaggaagcactatgaaatatcaagatgtaacaaaaaccccctgtgagaacgcttattttctagtctttaatcttattaactcatcggaaacccgccctactcttatcgacttttgtaataatctatcaggtcttcttcgtagtatgagaacccgtttccctgaattagacgtaagttgtgtgatgggatttggtgctgatgcatggtctaaactattccctaatcaagctaaaccgcgagaattaaatacctttaagcaaatcaacggcgatgtgtataccgcagtatcgacacctggcgatctgttttttcacatacgggcactaaaggtatccgcttgttatgaattagctgcaattattagccaaaaattaaactctattgccacctcagaagatgaagtacatggtttccgctattttgatggtcgctcaattattggctttgtggatggaacagaaaatcctgagtttgaagatgagcgtgtcgcttatgcggttattggtgatgaagatccactgtttaccggtggaagttatgcatttgtacaaaaatacattcatgatatggcggcttgggaaaaccaatctctcatcgagcaagaaaaagtgatcggtaggcataaattcaatgatgttgaactaactgatgaagaaaaagatccaggctcacacaatgtcgtcaccaatattcaagatgaaaacggtgatgatttaaaaatcgtacgagcaaatatgccgttttcaaatccctccaaaaatgaatatggtacctattttattggttatgctcgctatttctcaacaacaaaccgtatgttagaaaatatgtttgcaggaacacctgaaggacataccgataaactactaaaattcagtactcccgtcacgggcacattattttttgtcccatctccggcgtttttagatgatatagaataaaagttgattatcagtacaaacaaaaagttaatagcaatagctcatacactgctctatattcgataagaacaagaaagagctattgctattcaatatgatgacggcattaacttacaatattaagcgcctgatcagtcaaccaatacccgcaaaatagcacttccttgaaaactaccttcaacagggtttcttatatcattaggatgaaaggttgatgtgatagaaaatgttttcgcagcacctgcgttaagtttaaatttacctttatattcggtatcgttatatttcaactcacaagagccaccattaccacattttgtatagttttccgtttttccagaaacaggtgcacttcctattaatgaaacggatactgatgcatcataatcacacgttagttgatagttataaggcggggtaacattgttaatagattcttctggggtcatatttccatgagataagttaataacttggtttttaatattacatttacttgtgatactcacaggaatattaatataactattcatataaggcttcattgcattaccaaattgaagataacccgtactgttaccaccagaccctttattttcttcataagcccatgcaaaaggaatatttaaattatatgatcccggataagccgtcgctctggacaccgccacagttaatgacatagaacgatctaacggaagcactgcagaacctaatccccaaacggttccaacactatggcaaccactcggtgactgcttagcataataatttggccctacataaacctgattattgttattattggtacctgctagtgtccaagagagattggacaaataatagctcaatcctgatgaatgtttttgccaagtatttgtttgtggcaatctaatccaatagcggtaatttccttcttctgccattgagcctgaaccactacagtaagaagcgataacccgccaccctttaacctgaggtatggtcaccttaattacaccactggcgttagcatctgtcacattaagcgcaggggctgttgctgatgcagtactaccatttgacggtacatgcaaaaaattttgttgccagcctaccgcatatggtgtggctaaagaaaataaagctattcctattaatgtcttattcatttaaaccgtcctactttttaggattacataaacctcagtctctgatactcatcattgactctgttttaggtttagttataaacaatgcttaatgatgcggaggccgtaaaatttccaggagataaatcagcagtacctgttttaaaaggaacagcagtaatagtaaattggctcctgtcttgccctgtattagaaaaaccttttgtaatggcataacctcgaggggctgaaccattcaaacgcaaaggattattctcatcaacactctctccttgatataaggcaaggccaaatcgatttgaattcacgctatctgcggaaactttaagcacattatcaggcgctccagctaactgaatgccagatactttgacgtaaggtgagcccttaaaataagtacatgtaataggaatattttttgtgatagcgcttgtttgaccatcgactttataagtcattatttgattaaaagaaaactgtatagggatattattattaacaacacaaggtggaacataaatagcgcctgtaatagctatatttatatcaactgcccgtgcagttcctgatagtaaatataaaaaaataggcagtataaaatatttacttttattcataagaaacctcaaattctaccgtggcattataaactccaggtacaacacttttttcctgtattgcttttggtgtcgcttcaacaaatgcattaaaggtcagcaacatcgtgccatcgttaagttgagttccatttccaccgttatggttttcacctaaagtaatacgttggtttccatctatatcaattaatccaatggctaacttacttttattaacgccagatgaaagtgtaaggtacttttgttgttcagcccccatctctggctctggctgcccattaaatttaattttcactgatttccataacgattttgcatcacactggatcagtttaatggtaaatttttctgcaggtctaaccgcaggatatttccaataatcccttggtgtgctatttaaaaaaaccacattttgatttaaacttggctgatcaattctacatggcgtatcaatcaaagtaccatcaaaattcattgttgtagccgcatttgcaacaggtaaaaaaataagcataaaaaataatatttttacccattctctataaaaataaataaccatatgatctaccttaaattaattatactgcaatttaagagttaatatatttaacttccggtcaagaatatttctctttatttcatctgaaaagaggtaattcaaaataacattatctttataatgctttaatctattcattcttatatcaatattttctacgttatcgttgattttatttgtgaaacttaacacactagtaaacgcaggtttactatttgagctgtttttaaaatcactataaatattacaaccaccaataacgacatcaatatcttttatgtatagctcttttaaactaatttcattcgaaataagctcacaaggagcatttaaaaatgagccttttatatatataaaaccatgttgatttttttcattttgattataaaaatcaatttttgctctattaatattaaagaatgatttatctcgagcaacaggttctgcaaagccaatttgagaaataaaaaggccattaatgtaaagcatcaacataaaaataaattttctattcttcacctttctatctccaaaatcagtttttattttttctctgctacacaacgattagcttgacattgaaatttaattgtcggtcttccaccataatcatttatataagataagtatggcgttgagtacactttactattaaccctttgtgacgatttaggggcaatcatgactgcattaaactcagaatcaaccgcttctttctttgaaccaccaataccgaatacagtgacgtaataaggtgttggattctctatttcataaccgtcagatagcttatttaaaactaattgatcttgccaaatagcatttggctctctcaatatttgtttcggtctataaaacaattttatttttgtatgtaaggcaatttgtaatacattattgtcttcagctttaggtggaacttctctaacattaaaataaaataatgtttctctatcgttaggtaacttttcaatatctggtgtcgcagatactttaattaacgctttatcaccaggctctaatcgctgaactaatggtgtggcaattaatggccctagctcaattttttcattcttatcattttcaatccatgtttgggctaaataaggtaattgtttattatcattagtaatattaataactaatgcatttgacccaccttcgtatatagctcttgttctatctaaagaaattgctgcataggagtttgatgtaaccattaatcctaataataaaaatgatatttttttcatttcaagacctttgtcgtttattaattaccgatatttatttttcacacaataataatatcttattactcggttctattttatttggaagtttagcgacacattgttgttcagctccccaagatactctaatttcttcatttgggttaatacctgttagccaagcaaaaccatcatcactaattattcctagctctcgtcctttagcattactaattattgaaccaaatggtggataagagttatcagctaacctaattattgcaaaggccttctcaccttttaacacttcaaattttctataaccaatagcaccttcagttaatgaagattctacaatcgcctgtgtcgcttctatattattaggtaatttagttaaatcgatcgttgtttcattgcgataataactattaatatcggtaacaacaccataaccccaattattggttgttacacggccaccatcaactggtactcctgcaacaccttcagtatcaactaataagcgagtaccaccattaaatccatctgggtgaagtgctgctcctttagcggtaatcgttaagcccccattagcagaaaaaccaaatgatgaggtatttttatttgagatagtggcattcgcattaatattagcgattgaagtatagcgtccataatagccagagaagcttgaactactatccatatcatcgccatatgtcgttgaaacatttaaattataattagctaagttatcttcagtggtattaaagtaccctatattatgcgtatagttccccgaatttcttgagccatcataatttataaatcctctattattctctaatggaatactgactcttgcaaagaagacatcattatctttgccatagtatttagatctcgatgcagataaatttaatgaaatatttttaactgcaaaaacatccatatatttatttaagttaatagaataataatcggaattactttgatcccaatatgtctgatgattatattgcaccccaattgatgtgttatattcagaaagacctttattaaaggttactgtatagagttctttctcttttccagtaaaatcatcacgataacgtgcatctaaataattttgcatcgtcatataattacgttcattaaatcggtatccagcgaaggttacatccgcatccaaattatcaaaacgtttagagtaactgactcgccatgacttaccttgcatagtgccacgatcaggtaatcgagcataagattgtgtaatatcggcagataccgcaccgaaagcgaacatatcgcgcccaaccccaagtgctacactattataatcaccggcgaaaatggtaccaccatacatagtccaagcattacttaaaccaaaagcagcttcagtcgtaccaaatataggtccttctgtattatgtaatttatctctagagcgtcctgcaacaaccttataacgaacttgtcccggtcttgttaaataaggaacataggctgtatcaatttgaaatttattcgtctttccattttgctcaataatctcaacatccaatttaccacgcaccgaactgtctaaatcttgaatggcaaatggacctgcgggtactgttgaatcgtaaagaatacgtccttgatgcttaacaactacccttgcgttagtttcagcgatccctgtaacttgtggtgcatatccccttagttgaggagagagcatccgatcatcactttctaaactaatccccgtataacgccaggaattaaatatattggagtttataaagttttcaccgatggttaggttagactttaaactgcggatcgcgcgatatccataaactcgagtaaaatttaataaatctttattgttttccgcatcaccagaggttcgattataattcccttgataatcagaacgaatacgccagctaccgaagttataaccaacagtaccattgtaataaatactttgcgtattgcttccttcatgagggatattaacattggtgttaatattataatcaaggatcaaacctgagatcccatcatcccagcgagatggtggtaaccaagtagcacttgtatactcaagccatatttgaggtattttaattgataatataccttcatttaattttgttgtaacttcaacaccatctaggcttaataagtcaatacattttccatcattccatgttggtagattattttctattttttcctttaatcctaaagatgaaataatatcacctgttaaacaggcttgagataacagttttttattttcatcttgagatttattttctctttctaatacgttaacagtatatgttgatgaaccgatcccttgtccattaagtactaagttaagctgatatttacccggtaaaatataaccggcttcactaaacctagcaaagttaatattatctttagatttagagtcaacaacatctaagttaaactctacagaatatacattttgagaataaattataaataatatagttgccaaaatgcttgtagatcttccactcatattctctctgttcatattggctaataaccttaattatttaagtcttaaagttttaatgagaagttgaaagcagctaatcattcataatttattttgaataaaacgcttgcataataatcaccaggagtaattacatccaacttttttacaacgtctattttgtaatatagatatgtattatccccatcaacatatattaatggtaatgactctccagaattagcgctatatccatattcatctattattttaaaatagacttcatcactgttattaaatgaaaataaatcagctttagatccactaacatctgaataaaatgttaacgtaacgcctttcactttatcgatatttttagtcttattaataaattggcaatcagataattttatttttatttttttactcgctaataaatcatcattattgttcattttattaacaggtatagtacctagatcaaccaattgatatttactatccatatctaatgtgcaagcaggcgaaattacttttcctaaaaactttgctgttccttgccaccaaactttatctgatgggatatatttatccaatacagctccgcttgcatatgttgaaaagattttagtgaaaaataataatattatgatttttttaaacatagattttggccttaaataatcgagagcagattaactgctctcgttaaatttaatattttttattcataggctaatgtgaagtttgttgtagcgttaaactcaccttcagcaattgttccgtttgttgctttcttagcccaagctgtatacatcagcgtattatcattattacccagtgcttgtaattcacctgcttcattgaatttaaccattgaaccagttgttgttcctgaaataacaatagcagtccctgtattaccagttgttgctaactcttctgttgcaccagtaatagtatttccattaaaggttacttttacgcctttataagaacctgcagcaccagtatcagaaccggctttagttaaatcacaattaaccaatttaattgggatttgtttaacttgagaaataccatctttctctaataggcttttgctgatttgaccaaaatcgatagcttggttagcactttcggtagcaataccacaaggtgcatcaataactttaccagtgaaagtaatagtaccatcacctgaagccgcttgagcaacagtcgcagaaaaagccattgatgcaatagcgaacatcgctaatttattcaatttcatatttttacctttatatttaacgtaggaattaaagcgttaaaaaattaactatgatatatagttacacacattatcctcatcccatccagagatgatattgttacttccattacttttaaaaacttatgactatttaaatttttatataaaatttaaactgtatttatacagatgatataaatcatctaaacacgcaaatagaatggaaacgaatcactattttttaatttatgttttataatatctacgacaagaacttttcgataaaactcagaccagtcagcatccaataattttaatatcatatctaatgtttcaatattgatacttgttattccattttcatatcttgatatttgttgctgactcacatcaagtaattcgcctaattgggctcctgttagagatttacgtatacgagattctctaataaaatttccaatattcttccttaataataaagaatcagatcctctattcttatcgatattcatgaaaagccaccttcgtatatgtaaattaccacttactttattctcattaataaatttaaatagaaaaatttaaaatacgatttacatctgatttgcagagacaatagtttgcttatcaatttatgtaaacatgtttaaaacgatagataatcaaaatacgatagtttacaactattgtttgttaaatatttatctattttttgtttcatgcatgtagaaaaaaatgaataaattcaatagtaaaattacttagtctaaattcgttaataaatgcaattttacacgcactgcgtgttaattattttcacttaagttaaattaatttagtttactttaatttttgcgatatatttacaatcaaaaaaagagcatctcaataagataaaattaagtaattgatgtttttttaataattacaacgttcattttgcttaaaataacacggctatattgattagatatccccatcaaagtgggtaaaaattatgatgagaaaaatcggttttgctcaaattcgcaaatcaatttttttaaaatcatactaattcagatataaaaatagctggtgtctatctcaaaaataagattagtaacagggtttactgacaatgtcgattaaaaatcagacgaccaagcagaaaaagaagatgtaaaatgggttggataatgtgagaaaagacaatatgggggcttaaagataacgcccaataaaccatctgggcgtttaatcgtttcattatatcaagtcagatcattacttatttatttgcgtccttttttaaggtctcaaattgtgtttgatttaggccaaaatcgccaaatttaagtaacgcaggatcatggaagtcactaccgccactttttagcaaaccaaatttattagcatagttttgggtcagttcatagtcgataggtttcattctagaatgacttatttctaatcctttcaatccaaactggacatatttttctatttcatcatagttgtcatagacacatgggtgagcaagtataggaataccaccatcttgtaagatagcagcaattccttcatcaacagggatatatcccatttttaagtctgtttctatttttgttttagagccaaaaagttgtttataacgctctttggtcatttcctctggatatttttctctcaatgcttggaatatattcattttaaaaacgatattatattttgagaactttttcgcatcttcataacaaatatcgtagccttgttgattgagagataatattaattctcggtgaaactgatcacgacagttgagagtgttatcacacagcttgtcaacgttgggcgttttttcgttaagccaaagtcccactacatggacttttttataaacgtcaaagtcataacaactcatttcaacacctttgacgatatttaatccaagacgctccccttctcggtaaatttcgtcataatgattggtagtatcgtgatcggtgatcgcaatagtcttaatgccgtttctaaatgcattttcaaggacatcttttatttcacaaacaccatcactatggtttgtgtgaacatgtaaatcagcatagatcatgaagaagtacctctgttaattcttccattaaaaatagtcgcgcaataatcgttagttaccataagcttgttattcatattgttttaacccacggttagtaaaactgtattttggtcgacatgttttttatcggtctgaacaacgtctagcttattatcatcattagtaatgatgatcatcgttgttggatcatagcctgcggctattatcgcatctaaatcaaattcaattagcgtatcaccttttgtcaccttctgacctttaacgacacagcatgtgaagtgctgtcccgctaagttaacggtatcaatccccacatggatcagcatttcaatattgttaaccagtgttaagccaatcgcatgaccagaagaaaaggtaatatcaacaacgccatctgcaggtgcaatcacttttcctgttgtggggataattgccatgccaggtcccataatgccagaagcaaatgtttcatcattaacctctgaaagtgcaaccgttttaccttgtagaggtgaaattaacccaacaggtaatttactattcgctatttgtggttttttgttggttgatgcagcttgtttattattttcttcttcgtcacggattgggtcatcagtaggatcatcaaaaccaataataagcgttgcaataaaagtggctacactggcaatcaataaggtgattattgcatttaccacttggttatctgtatcagatatccacattggtaaacttaataaccccggagtgacatagacgaacgcttttaacttaacaataccagcaaataatcctgcaatagcaccaccaatcatacaagcgtacattggttttttcagtttgaggttaaccccatacatagcgggttcagttataccaccaaaaaaggcggtaatactggcagaaaaagctaattgttttaaggttttgtttttagtacgtacagaaacagctaaagaagcagcagcctgagacatattagaacatagcgccatcacacgaataatgggatcaaagcctttttgttccactaacataatactgacaggactaagtgctttatgcataccaatagatactaaccatggataaatagccactaataatggaatagcaataaaaccggtgtgctcttggattaagatcaccccatcagcaattaattgagcgaaccatgaagtgacaggaccgaccgcaatcaacgcaataggtgtcgaaactaaaatcaccaataaaggcaccataaatactttaaccatttctggcacaatacgaacaataaagcgttctatataagacatcatccaaacagtaattaaagcagggatcagttgagatgaatatttaaccaaagcgacaggaatatgcataaattcgacaggctcaccggctttaactaagcttgtccattcagggctgaccatcgctaaacagaccatcgcagctaaatattggttacaattaaatattttcgccgccgagaaaccaataaataccggcataaaatagaaggccgtattaaagataaagttaaggatataataggtttggtcacttttatccaaccaacctagcatcgttaatacaataagtaacactttccccataccggcacccgctaacagagggataaccggagcgatagagccagtaattgctgataatattttatttacgatagactgtttcttctggtctttattattatcatgaggagtattatttgtttttatcatttttgttagttcattaaatactttatcaacatcattaccgataaccagttgatattgtcctcccttcatcacatcagataatattttactatttgctttggcttttgaaggatcaattttatcttcattatgtaatgtaaaacgtaatcgagtcgagcagtgtactaatgactttatattatcctcgccaccaacaatagcgagaatttgttttgcaaattctttataattcatagcattgccttttatttattctgtaaaaataaattaaagatatatggatagagttggttatcgcctaaccaactaaatttaaatgatttattattacggcatattttttatttattcatctttttattatcctctgcaatttttgcaatatggattattagatataaaatttcattgtcatctaaggtgcaattatatttatctttaataaatttacttattttcaaacagcacatataaggttgatggtacttgtcttttattatatcgagtaactcattttctaaaggttcgtgatcattttcaggttgtgaaaataatcggatggagaaatagcgaaggtgtgtcacaaaacgacgataatttaacgatcctatgtcgtactctatatttaaataatatttgactatattagtaatgctttggataaagtgggtcactttgtaggtttgctgaatattatcgtttgttctaatactggcgatatgtaatgcaataaatcctgcttcatcttctggcattgaaatgttaaatctatcattaattaattttaagccataaagaccaatatcaaactcttcactataaaaattttttatctcccacaatattttatttcttataaaagtcccttctttataccgttcaatgctggcttgaatatggtcaatcaatgcaatatagatactatcttgtgtatctaaggtcattttttcttttgcatactgaataatattgtccgcaatttctacgtaatctaacgtaatattcgataaaagatcgagcactctctgcggacaatttttaggacttaagataaattttttggttatttgttcagatgttatctcatcacctacttttttggcgtaggcaatcccttttcccatgacgataatttctttttctgcttcatccagagagatcacaacactgttatttaatatttttttaattttcatgttcatctggcatgctcaaaaattttcttttattaaggcttaaaaacgcaaaaacccatttgtagacaaaaaatacttttcatctacaaatgggttttgtgtagtaagccaggtactattacaatccctacgtttactaggacgttaacatgggatatttatatcgtcaaacttagcacagtaaagttagtaatagatcacatatttatccgacttattaaaaaaagattgtttaaggtaagaacgataccggctgatggctttatatttaaatttataaccatatgataatattttataaaaaataaatatcctctagattagctccaacacttaaaaataacttttttatcagaaaaaatgacattaatatcattagtataagtttattttaatataataggtctatctaaaggtaaaaaatgttaaaaattagaatatcacgcccctcagaagcaccaaaaatcatacaaatctggaaaaattcagtcgatgctacacatgactttctgacagctgacgatcgccaagagattgaaaaagaagttatcggttttttttccgaaacaccggtatgggttgctactaatcaagaagactgcccactcggctttatgtttttacatgacggtcatctagaggcgctttttatcgatgcatcagcacgagggttagggataggaaaacagttaatatcacacgcattaactcttcatcctaatttaagcgttgatgtcaatgaacaaaatcagcaagccgtcggtttttatcagcatatgggctttcaaatatctggacgttcggagttggataatcaaggaagagcgtacccattattgcatctaagtagagctaagtaagacaataagaaaacataactattattatttttccaaaaaaataagccatcactcatacttttattggcaaagatatttagatgattaaagcaacacactgaaaccttatggtatgatgccgtattatgtttgtgaaataaaaccagatagagtttaacaaccaacactcacaaacgagataaacttcaatacgttaagaaagacgacaccatgactgacagccaaaatttcgaatcccacacccccatgatgcatgggtgtgttaacgttgatgtataacgatatttattgatttttcgaaaaaacatataatttaacctacacttaattaatcctttgatttataggtagttatttttttatttaacctagccagcgcttatactctaaataattcgaggtgcagctaggcgacaagtgaatgagtctctaagagcatacataagtatgtgactagtgcgaatgaacgtagtcaacaacgatgcaacttgaagtatgacgagtataaaatgaatagatatgatgtatctaatagcgaaggaaaatttgctgacggctctgatgaagaggtactggctaacaagctagggctttcaaacgttgatgatatcaatgatgctgagcttgtcctgttagaaaaactgtatcaagtcatttttgaagaacaatttcccactgagcaaattaccgtatcacttattcagcgttggcaccgccaatggctaggaaatgtttacgagtgggcaggtcaattacgcacggtgaatattagcaaaggtggctttatgtttgcccctgcgggacgtgttgcaaagttacttgctcaatttgaaaaagagcatctcacaaagtacacaccctgcaccaatatgagccgagaacaagccatagaagctattgccatagtacatgtggaattaattctgatacatccgtttagggaaggaaatgggcgcttatcgcgtttactcgcagatgtgatggcagtacaagctggtttccagccgttggattatgaaagttggactcaacaccccgaacagtacatcgcagcaatccacgctgggttaaacctgaactatgaccccatgaaatattgggttaatgaagccttaaaagaaaactaaatcgccagtttcaaatgtccaaacttctcacgcttcgctttcatctcttcttcaagacgacgagactcctgccctgtttcaatcgccgtagaggttgctaccgaacgaataagttgagtacgagttggtcttgttgcttgaattaattcgttctttttcatggtagtctcacttcaaactgacgataatgcattttatcaccgttgttttatatggcaacatagatcacttttctagttaaaaattttatagtgcaatgtctctttattttcgtctgctttgagcgataagcggacatattcactgaaaattattggaagccttttcttgcctagattggctttatctgtagattttcaagaaaatatgtaccgttatcgacacgcatatcaaaagccggaaatgagtcaaatgacgttttatctttcatgattcttttttttctgtgacttcaaaattttctttccgttgccgaactaggctgaaacttaactttccggccggaacggtgataatacccagacacgcaactattagaccgacgccagcccatcctataggtggcaatctttcaccgacgagcagaatggcaaggagcgcggctataatcggctccaacagagtgattgtggttgccatactggccggaatgcgcgcaagcccgtagccataacagacatacccaagaaacatcggaaccagtgccatataaataccgacggcggcattattccatgccattagtagcggcgctcctgttacaaaaagtacaggcataagtaaaataccgccagcaccaaaagtgacccccattgcggcgcgagaggctatcccgacctccattaaccgccgtgcagaccacgagtaaaaggcataggtgaagccagccaacagtcccagaaagatccccaccatggcatggtcatttgtggtactgcttccactactttctgccaagcagagtagcaccatgcctgtaacgccaacacccgctccgcacatccactgccgggtcaaacgaagagcgtcaagtcggtattcaatcagggcggacagaatcggcgcagagccaatggaaataaccgtacctaccgtaacacctgcattgtgcatggaagcataaaaagcgagagggtaaaccgctaccgccactgatccggtcagcgagaaataccagttctggataatcagagcacgctggcgaattattgttgtcgcagcgataataccctgtaatagcccaccaatccccatcgccacagctcctatggctaaaggactcagacctggggcatatgtcgcagcagtgccagtcgttccccagagaatagcggcgataagcacacctactatgccgccaagtcgctgtcccgaagaaatcattagtacatctccatcaactgttctgcaatattgctggcctgtttaacgcagttactgttaccttccagcccggctcgtgaaatgctgccttccagcagaaaggcaagatgtcttgccatacagtgtgcgctttcagcctttcccttcatcagttccattaaatgcgcaaccagaatcgcttccacctcttctttgtgctcacgaacggcctgacgacccggaactcctgcgggaagttcggctgccgcattcagaaggccgcagccgcgaaaaccgttctcataggcaaattcagcatgatcttcataagcatagaaaacagccattaccctctctttgggtgtcatggctagttccagccgggttttatacaacgaaagccattcttcatgccgaactctgagataggctgccaccaactcatctttggatgcaaagttgttgtacaggctttttttagcaacgccggctctttttactatggcgtcaattcctgtgccattaataccatgattataaaaaagaacacgtgcagcactgagcagtttttctcgggcagtttttgaaccttcagataaagatgtcatgatcagcctctttgtttatatgtaggtagaccagtatacctacttggaataccgaagcaacaaaagtctgcatttatcacaggcagtgcgatccttaataaggtggcctagcgaatagaatgaagtaaacaaggtagttatatgccgcgtcagtagcaatacgacatcagtcagcatgtttatatacgagaataaatgtccgcttctggcacagaactgccattcaaataagtatgattctgtgccgcggagaaagtacaaactaatcaaaaaaaattaattttaattcaactactaacagccatgcttcaacactatatccaaatatgggtgcttccaatcgccatcagacagcttacgcaagctcacaaatccatcatgttctaatgcacaaacaccgctgtgtgaactcacataatcatagactgcaccgctttctagtccttgaatcatatgggcaagcaactttcgcttcatctttttactatctttagtccatttttccactcaccgctatgtgacttcctccacgttgtgttaaatggatgtcctacagcatttgtaacacataacccatatccattcttctttcctgtctttagatactcgtcaagaagtaggtttaaactgtcacaaagttcttttgtttctaattcccaatgtttcagcatttctgatacataatcgtcggaatagagcttttgtagctttttcaccatacttcccttcgctgacaaactaacagagccagcattaaatatagtgccgtagcggatagttttaaccagcgcatcatcgacccctagcgtatctttgataaagtcggtttctaatacagatagtgaatcggtgctaattccatatttattgaattcttgctctagaataatcaattggcaccctttaatatcataattgtacccgttagctaaacatgcccatttcatcttgctgggtaaatattgaaaacctgtacctatctcaaaagaacggctccccactttggcggttttatacgcttgtcgatactcaacgattagtagcgttttgcatgctcattaacacaataacgctacactttcacagaacatcataaaaataagccatcaatcatacttttattggcaaagatatttagatgattaaagcaacacactgaaaccttatggtatgatgccgtattatgtttgtgaaataaaaccagatagagtttaacaaccaatactcacaaacgagatattcaatacgttaagaaagacgacaccatgactgacagccaaaatttcgaatcccacacccccatgatgcagcagtatcttaagcttaaggcagagcacccagaaatcttactgttttatcgtatgggtgacttttatgaactgttttttgatgatgctaaaaaagcctcacgcttattagatatttcattaacaaaacgaggtcagtcggcaggtcaacctattcctatggctggcgttcctcatcatgcggttgaaaattatctggctaaattagtgcaattgggggaatccgttgccatctgtgaacaaattggtgatccggccaccagcaaaggccctgttgagcgtaaagtgatccgtattgtcacaccaggcaccgttacggacgaagcgctacttgaagagcgccaagacaatctattagccgctatctggcaagataaaaatggcgcttttggctatgccactttagatattacctctggacgttttcgggtcactgaaatgccggatagcgaaagtatggctgccgagctgcaacgcactcacccagcagaactactctatccagaaacctttgagtcaatggcattaattgagcgtcagcaaggtttacgccgacgtccaatttgggagtttgagtgtgaaaccgccaaacaacaacttaatttacagtttggaacccgtgatttaactggatttggtgttgaaaatgcccgacttgcactttgtgccgcaggttgcttattacaatatgttaaagatacgcaacgcactgggttgcctcatattcgtagcattaccatggagcgtccgcaagataccattatcttagatgcagccactcgccgtaatttagaattaacccaaaatcttgctggcggttgtgataacacattggcatctgtacttgatctgtgcgtgaccccaatgggaagccgtatgctcaaacgttggatacacacccctttacgccagcgtgaacaattaattaaacgccaagatgcgattagcgccttacaacccctctattttgagttacagccttttttacgtcaggtgggggatttagagcgggtacttgctcgtttagcattgcgatccgctcgtcctcgtgacttatcacgtatgcgccatgcctttcaacaatatcaagatatccaccaagtgcttgatcaagcggatatgccctatattaaagaattacagcagcgtatcagccagtttgatgagttgcgtgaattactggaaaatgccattgttgaaacaccccccgtattagtacgggatgggggggtgatagcctctggttataatgcagaattagatgaatggcgagcactggctgacggtgcgagtgactatcttgaaaagcttgaagttcgtgaacgtgaaaaatggggtattgataccttaaaagttggctttaatggggttcatggttactacatacaagtcagtcgcggccaaagcaatttagttccaatgcactatgtgcgtcgtcaaacactgaaaaatgctgaacgctatattattcctgaactaaaagagtatgaagacaaggtattaacctctaaaggtaaagcattagcaattgaaaaaatgctctacgaagagcttttcgaaaaactattacctcatctaaccgccttacaaaccagtgctgaagcgttagctgaaaccgatgttctggctaatctcgctgagcgtgcagaatcactcaattatacacgccctgaattaacagaaaaaacaggtattcaaatcactggtggacgtcaccctgttgtagaacaagtactgagtgagccatttatctcaaatcctctacaactcgcgcctcaacgtcgtctactcattattaccggccctaatatggggggtaaaagtacctatatgcgtcaagcggcattaattacgctactggcttatattggtagttttgtgcccgcagaaaaagcggtaataggcccaattgatcgtatttttacccgcgtgggtgcctctgacgatctggcttcgggtcgttcaacatttatggtggaaatgacagaaaccgcaaatatccttcataatgccactgaaaacagtttagtgttaatggatgaaattggccgaggcacttctacttatgatgggctttctctcgcttgggcttgtgccgaaaatttagcgaatcgcattaaagcgatgacactctttgccacacactattttgaattaacgacactgccagaaaaactagaaggcactgccaatattcacttagatgcggtagagcatggggaaacaattgcctttatgcacagtgttcaagaaggtgcagccagtaaaagttatggtttagcggttgcggcattagctggtgtgccaaaagaggtgatccgccgtgcaaagcagaaattaaaagagctggaaaccctatcaggtcattcaggggcaagccatgtagaaacgtcacaactgatgttattagcagatattgagccttctgaagttgaattagcattaaataaaattgatccggattcattaacaccaaaacaagcgttggaattgctctatcacttaaaagagctaaataaataacaaaagaaaagccgattagttaatttaactaatcggcttgataacgcattgagcacctaaagcaactagttcatcttaaaaagtgcctctatgcataatccttgcccttgcagaatatcttttaaacgacgcaatccctcaacttggatctgacgaacccgctctcttgtcaaaccaatttctcgaccaacatcttctaatgtttcagcctcgtaacccagtaatccaaagcgacgcgctaatacttcacgctgttttggatttaattcaaataaccattttacgatattttccttgaggttattattttgaatggttgcttctggcccttcttcattttcgtctgaaataatatctagtaaggctttatctgaatccccaccaatcggtgtatcaacagaagaaatacgttcatttaaacgtagcattttgctgacatcatcgaccggtttatccagcgtttgcgcaatttcttcaacacttggctcatgatcgagcttatgtgctaattctcttgcggttcttaaatagacattgagttctttaacgatatgaatggggagacgaatagtgcgggtttggttcataatggcacgttcaatagtttgacgtatccaccatgtggcataggttgaaaaacgaaaccctttttcaggatcaaacttttcaacagcacgaataaggcctaaattaccttcttcaattaagtcaagaagagctaaccctcggttcgtataacggcgagatattttaacaactaaacgtagattactctctatcatccgttgtcttgatgggatatcacctcgtaacgctctacgagcaaagaatacttcttcttcagcactcaacaatggagaatagccaatttctcctaaatagagctgagttgcatctaacgcacgctgattgactccttcaatgagttcaatttcatcttgagcgtcagattcattttcagcctcttttgttgcggctgcttcatcgaactcttccatgttctcatcaatatcatcagtatataactcgtctactcttagcgtactttggctcatcagctgctcctacccttgataatttaggtaaacgacgctcttaatgagatcgatttaccagtttatcgctgtgtcacgacacaacgggtttactgattttcccttgtaacgaattacaaaataaaaaaataacataatctgttttactgttaatttactttatagtttattcaatatatttattaactataagtattagttattaacagcaattattattattttacgtatatttatctatacgtatattcactgtttaacaagcaatatgtgacaatgtacatcaaaaaaaagataaacaaaaatccgcaataataaaataatattcaataatatatattattctaaagataagacaaaaaacaaacctataataaaaacaataagttaattcaatacactatctttgaatacattagatttttattcatacttttaactaacgttttttagcatactcattcattgttcgataatcaacagtctaatttaatcttatctataatttgacagaaatatctcattttgcttacgttacaactaagcaatcttacttagtgaaagaaatttattttcaaggttttaattaatttaataactaaaaaagcccttttgttaatattaacaaaagggcttaattttcagattattcactaacaacgttaagcgtttatttatcttttaggtaaatagctcattgggttaagtgatttttctttataacggatctcaaagtgtaatcgaacagaactagtaccagtacttcccatggtcgcaatttgctgtcctgcatttacattttgctgttcacgtaccaagattgtatcgttatgagcataagcactgagatattcatcattatgtttaatgataactaaattaccataacctcgtaatgcgctccctgcataaaccactttacctgcggctgttgccacaatgggtgagcctcgtgtaccactaatatcaatacctttattaccaccaggtgcatttgagtagctctcaataattttaccttgtgctggccatacccatttacctgttgcggctgcaggtttagaggttgccgttgtgttattactggttgttgccgaagttgttggtgtcgaagtcgttgtctttggcggtgtcgttgttgttggtttcgtgatcaacggccccattgagctattattatttgacggcttagtttgtgccgtctgaacgccttcactacttggtttattaattactgaagtatttacattggtattggtaccggtattaacttgacggttaccaatcttaagtacttgtccaacatttaagctatatggctctggaatattgttcatcgaggccaaatcttttacatcactatccgtgatccacgcaatataaaacattgtatcgccacgtttaaccgtataagtgttaccgctgtaattccctttagggatattgtcataattacggttatacacaatgcgtccgctaccatccgtattgatattttgaggggtaacattttgcgtacgaggctggctttgaggctgcgcggttgtgttattcactctaatagaaggaggaggcgttgtttgtaacggagttgaacctctttcaataggtgttgccactcctgcattactgttagttgtaacaggtgatgtagaaacggtacgatttgacgaactatcattgacagaggttatcggtgcaggacgataaggcgtgtcggcacagcctgttaatgcaaatccgattaccgaacacatgattgcccagcggacatgcttaattgggctttctgaattcatacttccttctcccttttaaaaggcattagcgtctagcaatttgttgagtaacacaaagagactgcaattttttgaaaatatttcatttattagtgcagattacgacaagctacaaaaaagcagtaataaaaaatggtcagatttatctggaagttatgctaactcacccgcaattagggggacaaagcgtacagcctcgatagattgatagtgaaaatcattacctaaacgacgaataaacttaagcatctgctgctgttcaccgacaggaatgatcatcctgccaccatcagctaattgcatcaagagtcgttgcggtacttctgttgcacaggcagtaacaataatagcattaaaggggccttttgatacccaaccttcccaaccatcgccatgacgagtcgatatattatgtaaatcaaggtgtttaaagcgtcgttttgcctgccactgcaatatttttatccgttcaactgaacttacatgatgcactaagtttgctaatactgcagtttgataaccagagcctgtgccaatctctaacacagaatccgttgcttgtaattcaagcagtgatgtcattttagcaacaatataaggctgtgaaatagtttgaccattaccaataggtaaagccgtattttcataagccttatgggagagcgcttcatcaataaatagctctcggggtactttgctcatagcttccaacagacgctcatcattgatgccgtgttgttttaacattgtcagtaagtctttcattgaccgacttaacatgttttttcgacctctgctttatttaaccaatcttttaataactcaagcgctttatacgctgttgaatcaacatgtaatggtgtgatggagacataacctgcatcaaccgctgcaaaatctgtatccggccccacatcatttttttcgccaggaggcccgatccaataaagggtatttccttttggatctgtttgtgtataaacatgttgtgaagcatgacgacttccacaacgtgttatacgaaaacctttgatctccgctaacggaatatcaggcacattaatatttaaaatattcccagctcttaaaggcactcgttgtagcatagctaaaacatcacaagtcacttgggctgctgtgtcaaaatgcgtttcgccatcaagtgataccgcaatcgcaggtaaacctaagaaccggccctctgtagcggcagcaaccgtacctgagtaaagcacatcatcccctaaattagggccatgattaatgccagacaccacaatatctggacgcggtctgacgagatggttaacaccgagatagacacaatccgtgggtgtaccttcaactatcgcaatatcaccattttcatgtcgctgtttacgtaacggtctatcaatagttaatgaattggatgctgcactacgattgcgatccggtgcgacaatttgtacatcataacgctggcgtaaggcttttgcgagtgtctgtatcccttttgccataacaccatcgtcattactcactaatattttcagcatcaatattccctaataatatcaattcacggacaacgctagtggcaaaacttcctgctggcaaaaagaacgataaagaaaccgtagtatcatctaaccaatgccatgacatattttctggtagcaaattaatcgcacggcgagtggtatcaactcgctcttgttgtgctaatgaccataatgcttcgtagtcagctaagttgtcggtttcaaatatcagtgcttgtgcttgtgtacctaagtcacctttacccggcaatggagcggtaatatgtatatcatgctcttcatagcgtgtttgtatttgggcaagttccgctccttctgccacaaaccaacttcttttaccgtgcaattgcatcgcatcaccacaaagcacttgagtataaatatgacgctcaagtcgttggctcaccagatgattaaacatcgcactacgtgcagctgagagataaaagctacgtttgctacgctcttttacccgaatttcattggttgcccaacgccatgcttggcgtaaattgtcgccattacgaccaaagcgttgcacaccaaaatagttaggaaccccttgtttttgtatctctactagacgagtttccaccgatgtcacatcggagatatcacgtaatactaaggtgaaatggttcccttttaatgtcccaatacgtagcttacgttgctggcgggtggttgttaatatttcgcaaccttctaacgtaaattgactaaagtcgggcatctctttacccggcatacgcaaacaaaaccattgttccgtaaccgcatttctgtctttaagcccagcataactagcatctcgaggatgaataccggcaaatttagctaacttttcagccacaaaagccgtattacaacctgtttttctgactctaaccatcacgtgttcgccttcaccatctaaggtaaagccgagatcttcgctgaccttaaaatcttctggtgtcgattttaatcgccctgtcgctgtcggtttgccatgtagccaatgaagttctggtaaatcactcattaagataaagactctttgattaataacaccaccgcttcacaagcgataccttctttgcgtcctacaaaacctaatttctcagtagtggtcgctttaacattgatatcatcgacatgacaatggagatcttcagcaatattgacacgcatttgtggagtatgaggtagcattttaggtgcctgagcaataatagtgacatcaagattaccaatacggtaacctttagccatcactcttgaaaaggcttcacgcaataatactcggctatccgcacctttataagccggatcggtatcaggaaataacgtaccaatatcgcccatcgcaacagcacctaaaatggcatctgtcaccgcatgtagtaccacatcaccatctgaatgggctaggagaccttgttcataaggaattctcacaccaccaataataattgggccttctccgccaaatttatgtacatcataaccgtgtccaattctcatattatgtgttccttatgctggtaatttgtcgagagaggaaaaattctgcaagagccaagtcttctggttgtgtgacttttatattatccgcacggcctttaactaataagggttcatatccaccaaattccatcgcagatgcttcatcagtaatgggtacgttttgtgccaatgcgttttcaagattttgttttaacaaggccgctgggaaaaattgtggcgttaaagcatgccatagcgtgtctcttgccactgttttttcaatatggttatcttgttgatgactacgtttcatcgtatcacgcacaggagaggctaagatcccaccacaaaattgaggatcaagatggttatcatcaatgagttgaataagattatccaaatcactaaaggacaggcagggtcttgccgcatcatgaactagcgcccatgtattttgcgcaagatgttctgtaatatagcgaagccctgataataccgaatcagcacgttgtccccctcctttaacgacaataattcgtttatctttagcaagagctaggtgataaaaatagtcatcttctgggttaattgcgacaataatttgcgaaatgcgtggatgttttaatagcgcattaatagtatgttcaaggatagtcaatctgccaattttaaggtattgcttcgggcaggttgcttgcattcgactacctatgccagcagcgggaataaccgccacaataggaaaagtagagtttggtatattcattatagtatttatatcaaggcacactattaattcaacaaattaacgacgtggttgggatttatcattaacaatacgataaaagctttcattaggctttatcatgccaagttcactacgagcacgctcatctaacgcttcttgcccgccattgaggtcatcaatctccgcaaataagcgatcattacgcgactttaattgtgcgttttgcgctaatgcagattcaacttcttgacttactttgttgtaatcgtgaataccatttttacctaaccacaatgaatattgtagaaaaccaagtaagatcagaagtaagactgttaatttccccattaccacccccaaaatgaatgggctaatcatcccacaactctcccatctgcgccacaaaagcgcgcagatatattacatgaatattcgtattccccccacccttaacataaacaatcacgctatttttcagataaagtataagttgtatgcttaaaagcgcgtttttatctgcagaagtggtaagtaaagaagtggtatttacactgtatttgccgccaaatcagtttattaaaaaaacccttctatccctacatattttcccagataagagaaaatgatgtagagatatgattagcggtaaatttgttgttgctgtaaataagcgaggatttgttgtgtaagctcattaatcgcgagtgagccgtctaaatgaatttctggcgcagtgggtggttcataaggtgaatcaatgccggaaaactgtttgatctctcctcgtcgtgctttttgatagaggcctttaggatcacgtgcttcacaaagggctaaaggtgtatcaacaaagatctcaataaatcgcccttgagcaaacctttctcttacttgttgtctatcttgctgataaggagaaataaatgctgttaagacaattaatccggcatcgaccattagtttagccacttcccctacacggcgaatattttcatgcctatcttgttcactaaacccaagatcatggcataaaccatggcgtagattatcaccatctaataaataggtgcggataggcgcatggagtgtcgagtactgatataaggtttgctctagcgcatcagccagtgttgatttacctgagccagataacccagtaaaccaaagtacacatcctttgtgtacctgttgtgcttcacgctcttttaaccctatttgatgaggatgccagacaatatcttgatgtatcgtcactattttcctcccagtaagtctcttgcgccccaatgcggaaaatggcggcggatcaactgattgagttcaatttcaaatgcatcgtattgggaagttgtgggttgcacgttgtcgcgaatttctcgaataagaccagcacccaccgtgacattgcttaatctatcaataaaaataagccctcctgtttgtgcattaagttgatagttatccagcaccaatggctcttcaaataacacttcaacatgcccaatggcatttagcgctaaactttcggtcacttgttgagtgagcttatccacatcaacttgatagtgaatattctctattttggcacgactttttttgcccgctactttgatatcaagggtttgcccctgtactaacggttgttctgacatccatacgatatccaccaacgcatgattgctaacattagcagtagtatcgttagcatcaacaataatgtcgccacgactaatatcgatttcatccgctaacaccagtgtaatcgcttgacccacttgcgcctgagtcagatcgccatcaaaagtcacaatacgtttaatggttgaacgctgtcctgagggtaatactttgatctgttgtccttgataaagagagcctgatgaaactgtgccactgtagcctctaaaatctaaatcaggacgattcacatactgtacaggaaaacgcaatctttgagatttagcccctaatttaaatttaaccggcgcatcttcaagtaatgccaacagtgtttctcctgtataccaaggcatatttaatgaaggagatactacattatctccctccagtgcagagataggcacaaattcgatagtgagatcgcgcggtaattgttgtgcaaagtgcaggtaatcttgttggatcgactcaaagatctcttgttgataatcaagtagatccattttattaatcgcgaccactaagtgacggatcccaaggagtgtgctaataaaactatggcggcgagtttgctcttgtaccccttttcgagcatcgatcagcagaatagaaagcgtactcgttgatgctcctgtcgccatattgcgggtatattgtgcatgtcccggcgtatcggcaataataaattttcgtttggctgttgaaaaatagcgataagctacatcaatagtgatcccttgctctcgttcagccgctaaaccgtccaccagcaaagcgagatctaatttttcaccttgagtaccaatctttttactttcgttttgtaaggtggagagctgatcttcgtagatctgccgcgtatcatgaagtaagcgaccaattaaggtgctttttccgtcatcaacattgccacaggttaaaaaacgtaataaccctttgttctgttgtgtttttaaataattttctacaccacctgattgtgctatttcaccggcgatcagttggttggttttgatggctgcaagtcccatagtgactcctattaaaaataaccctgacgttttttaagttccattgaagcagactgatcactgtcaattaaacgcccttgtcgctcgctactggtggaaattaacatctcttcaataatggcgggtaatgtgtctgcttgtgaaggaatagcacccgttaatggccagcagcctaatgttctaaagcgtactttttgttgtgtgatcacctctccagcttttaggtcgattcgatcatcgtcaaccataatcaaggtaccatcccgctcaatgactggacggtgtttagcgaaatagagcggcacaatatcgatattttctaaatagatatattgccaaatatctagctccgtccaatttgataatggaaaaacgcgaatactttcccctttattaatttggccgttgtagttttgccataattctggacgttgatttttcggatcccaacgatgagatctatctctaaatgagtaaatacgctctttagcacgcgatttttcttcatcacgacgcgccccaccaaatgcggcatcaaaaccatatttatccagagcttgcttaagaccttctgttttcatgatatctgtatgcttggcgctaccatgaataaagggattgatccccaattgtgccccttggggattacgataaactttgagatcaaaaccatactctttggccgttttatcgcgaaactcatacatctcacgaaatttccaacccgtatcaacatgtaaaagaggaaaaggtaatttcgccggataaaaagccttacgtgctagatgcaacatcaccgaagaatctttgcctattgagtaaagcatgacgggattttcaaattcagcgacaacttcacgcagtatataaatgctttctgcttctaattgctgaagatgggttaattgtgtttcattcataacaacctcgtttaggcaaaatgaaccaaagatgagtggatggcagaggtatgttgagtttgtctatcaccaaaccacgcaagttggtgatgtaatgcagcaacttctccaacgattaataatgccggggtgggagcttgcttagctaattgcgctaattgtgttaaatttcccgttaagatctgttgatcatggcgtgtaccgcaactaatgacggcaataggggtgagtggtgaacgaccttgctctattaaacgctggctaataagttctgctttcgtcgttcccatataaattgctaacgtatgattagcttgcgctaaagcttgccaatctggctctatcccccctgattggcaatgcccagtcataaaagtgacactttgcgcatagttacgatgagttaatggaatacccgcataagcactggccccactagctgcggtaacaccgggaacaacttgaaaaggaatgccatgttgtaccgcaatttcaagctcttctcctccgcgtccaaaaataaaaggatcgcccccttttagtctgacaactcgtttaccaagctgagtatatttcacgatcaattgattgatttcttcttgcaacgtactgtgttgccccgctcttttacccacacaaattctatcagcatcacggcgcaccagttctaagatatctgcactgactaaactgtcataaagtaccacctcggcctgctggataacttgcaaacctcgtaaggttaataacccggcatcacccggcccagctcccactaaagcaagctcaccttgtgggctatctggatgagacagttgttgttcgagctgtgcttgcgcttgtattaattgaccacttgccactaatgaggcaaatttgccgctaaacgcttgctcccagaaacggcaacgtgcttgaaaaccagtcagtttttgtttcactttattgcgccatttccccgcaatagtcgccatagtccctaatgaggtaggcaataatgcctctagcttttcccgtatcatacgaactaaaacaggggctttgcccgctgatgaaatggcaattaatatcggatttctatcgataatggcaggaaagataaaagagcattggggttgagagtcgacgacattgacaaaaatgtggcgtgcttgcgcatctagatacacttgttgatttaataccttatcgtctgttgccacgatcaccaacatcatgccaagtaaatgctctgcctgatattgcccagcaatccactcaatttgattttgctgataagcaagatgcaattcatcacataactgtggcgcgataacacgtaaccgagcgcccgcttttaataacagtacggctttacgcgcagcgacatgcccaccgccaaccagtaatactgggtgctgttttaattccacaaataagggtaggtaatccatacgcgtatctcacatttttattgtttacttatatgaataacgactataaaaggtgcattcggggttatgaaatgacaaaaagctatgtgatggaacagaaaggaataagcaaaaatataataatttcaaatggttattattttactcacgacaaagagggcaacagatgactctattgcccactcaaaataaatagcgatattaataatgaataataatattattcgtgtaatccacactcacgttttaagccaaagaatcgcgtctcttcttcactcattccctcttgccatttgcgtgtcgtatgcgtatcacccacagacagataaccttgttcccataatggatggtaaggtaaattatgctgtttaagatattgataaatttgtttattatcccaatcgactatcggtagtaacttaaaaatacctttcgctatggataaaacaggtaaatgctctcgactttttgattgctggcgtcgtagccctgcaaaccatgtcttcgcctgtaactcctttaatgccttttccattggcgcaactttatttatttggttataacgttcgataccttcaatcccttgcaaccaaagtttgccgtagcgtgcttcttgccaagatgaagatatttcagcgcgatatacttttaaattaagttgtagtgaagaggttaattcatcaataaattgatatgtttcgggaaagagataacctgtgtctgtcaaaattacaggtatatcgggatattgtctggtgagcaaatgcaaacaaactgccgcttgaataccaaaacttgagcttaaaacaaactggttaggaagatgttctaaagcccaaatcacccgctctatcgccgttttttgctctaattgttggttgatttcatcaagcgccagtcgctgctcttcaatcgatagcaacaccaactgagaaagtgataatcgactcatatcacctcctgcacttcataaaaatcaatggctgaattaacaacgggtttgataacatcagtgcgaataagaaaatcaccaaaaccttcatttaattcacgtgaaatagcccactgaccaattaaagtatcaagaatttcaatgatttcttgtgatgaaatattttcacgatacattctaggaatgcgagtacccatgcggtttcctcctagatgtaagttatagcgatcgggggctttacccaccagtccgacttccgccaacatcgcacgaccacaaccgttaggacaccctgttacacgtacaacaatatgctcatcactgactccgtatttagccatgatattatcaagggtatcggtaaatgcgggaaggaaacgctccgcttctgccatggctaatgggcaagttggaaatgaaacacacgccatggcatgtttacgcagcggtgtaacctcatcattaattaaaccatattgacgcgctatcgcctcaatctgctctttctgtgcctctggtacaccagcaacaatcaaattttgattagctgttaaacgaaagtcaccaagatgcactttggcaatttcagcaacccccgtttttaacggcgcattaggtttatcgattaatcgaccactttcaataaataaggttagataccatttgttatcaaccccttttaaccaaccaatttgatcaccacggtgagtaaattgatacggtcggatcatatcaaacataacgcctgagcgacgttcaacttcctgtttaaatgtttcaataccaacacgctctaaggtgtatttggttttggcatttttacgttcagtacgattgccccaatctcgttgcgtcgtcacaatcgcttcagcgactgctaatgttttatcaataggaatataaccaaattcactagctaaacgcggaaaggtttttttatcaccatgggtcatcgcaaggccgccaccgactagcacattaaaaccaaccaaatgcccattttctgcgatggcaataaaattcatgtcattggcatgcaagtcaacatcgttataaggggggatcaccaccgatgttttaaatttccgaggtaaataggtttcacctaaaataggctcctcatccgttgtcgccactttctctttatctaaccaaatttctgcataggcatgggtgcgtggcaataaatgctcggatagttttttggcccattcataagcttcttgatgcaatgaagattgttcagggtttgaggtacatagcacatttcgattaacatcattggcggttgcaagagcatcaaggcctgttgacgctagcatttggtgagccggtttaacatgaccttttaaaatgccatgaaattgaaaagtttgacgattagtaatacgaatactgccatagagcgtattttcactagcaaacttatcgatacttagccactgctttggtgtgatgacaccgcccggtaaacgacaacgtaacatcatggcatgacgaggctctagtagctgttgggcacgctcggcacgaatatctctatcatcttgttggtacataccgtgaaaacgaattaataaaaaattatcgccctcaaaaccaccggttagaccattttgtagatcatcactaatagtgcctcgtaagaaattactctcttttttcatacgttcactatcagatagttttccttcaaccactaagggcgcttgagtttgtgatttcattttaataaacatccctctgataacgacgtgctaaacgtagctcacttaaataatcatctgcttgttcaatatttttattgccatgggtcattactatttctaacaatgtttgttcaacatctttagccattcttgatgcatcaccacaaacgtagagataagcaccttgctgtaaccattgccaaatttcctgaccttgctcccgtaatttatcttgcacataaattttatcggcttgatcacgcgaccatgctaaatcaatacgtgttaacaacccgcttttgacataacgttgccattccacttgataaaggaaatcttctacaaaatgaggattgccaaaaaagagccagtttttccccgtcgcaccttcactttcacgttgttgcataaaccctctaaaaggcgcaatccccgtccccgggccaatcataatcacagggacttgattatcttcaggtaaacgaaaatgatcattacgttcaataaaaacgtttactgtatcgccttcttgaagttgatcagctaagaaccctgaggcacctcctgtataagcacgctgatcgacgttataacgaacaacacctaaggtaagatgaacttcatcatcaacttcttgttgtgatgaagcgatggagtaaagacgtggagttaatgggcgcaatatatcaataaactcttgagcattaggttgcgcactatattgacgtaccatttcattaattgggtaggtttgcgcatattgctgaagtttgcttttatcagccaccagcgataataactcttcgtggcgggataattgggcatacgctttaataattggtgcactattttgagttaattcaacatgatgcaataatgcttcttttaacgttaatgtttgtgatttaacatttacctgctcatcccccgttaaccataatagggtaataagctcatccactttttcttccgaattcttaaaccatactcctagtgcatctccgggaagatattgcaattcagagcctgctagactgatttcaatatgacggatatctttatctgaatgtcgaccggtgatcttctgattagttaataaagtggcactaaaaggtgcatcacgatggtagcgtgcggtatcgacactgtcggttgttcctgattgtgtttgttgtaatacttgagtgttttgctcaggtatacgtatttttaaaatatcagtcagctgagttatccatttatcagcgtcagcttgataatcaacatctgcatctaatctttctaatagactggtcgcgccaagttgcgccaattgatgatcaaaatctttacctgcttggcaaaaatgttcatagctactatcgccgagactcagtacagcataagccgtttgcttcattggcgcggcttttttagagtgcaaatatttataaaatgtgatggcttcttcaggaggttcaccttccccctgtgttgaggtaataataattaaggttgtcgttttgtggatctgcttaaatttatattcactcgcactatagagctcaacattaagttgattaccaaccaatttatcgcgtaattgttcagctaaacgacgtgcattgccagtttgtgatgctgatatcacggtgatggtttcttgttggggaacctgactttgtacacttaccagttcatctttagtggatgaatgctgattgaattgcccccaaaaatagccagaaagccaagcaaattgggctggagttaagtctttcgtcacatcctgtaatttattcaattgctcctgtgttaatggaagcattgataataatgggggttgattgctcatcgatcctgccttaaaaaaacattgcactgcatcggtgctgttattgtggttggacttttttaatgaataagagggtatcgcacgatcagagcacgacttaaagactggtttgctctatctaataaccttaaagactaaatttatttaccgatttcctttatcgatataatgaataaacgaaaaagaatataataagtcgctaaggttaagcgattaggcgtaacacactaaatcagatacactaaatagacaccgttttatctgtatttttttactatttaagtcaagagagttttgatgataaccaccatctttaaagattttcagtttgaagctgcgcaccacttaccccatgttcccaaaggccataaatgtggacgtttacatgggcattcatttttagtgagattagaaatcactggtgaagtagatgcgcagtcaggttggctaattgattttgctgatgtgaaagccgcatttaaaccgactcttgataggctcgaccactattatcttaatgacattgaagggttagaaaatccaaccagcgaagtactggcaaaatggatttggcaacaagttaaaccatcactccccctgttatccgccgtgatggttaaagagacatgtaccgcaggatgtatttatcgtggtgagtaattttcacctaaaaaaatcagccactcataggctgattttttttaacgataaatgacacactaggcgatatttaaatatttatgtgtttgcattgaaaaacgccaattacgctcaatacaggttttaatacataacgctgttgcactctctttacaactgattggttgtaaggcaacgatcgccataggttgttgagttcttaatcgcagtaaatcatccagtgcttcgatatctttttcacgagcaacagggtgtttaatttcattggcacgattaatcgcactagataaaacactcaatccacctcgcataccaactttcggcgaaagtgttacccatgttgcttcactacagaggatgtcatgcgtgccactggtttctatttggcaatcaaaacctgctttttctaagccttccgtcaacggccgtaagtcataaaggcaaggttcacctcccgttatcaccacatgctttgcgctataacgttgttgccggaaaagtgataaaatatcttcgacagtggctataccccaagtatcactttcttgtgttttaatgggaatatctccaagagggactttcttgctctcttctttttcccaagtatgtttggtatcacaccaactacatcctacagggcatccctgtaatcgaacaaaaagcgcaggaacgccagtaaaaacaccttcaccttgcaaggtttgaaacacttcattaatggggtattgcataagaaactctgatatccaatgaatgctgatgattattacagataactgtctcaccgtaagaggctttatgataaggtacatgctttgttttggatagctaacgtgcgaaaagacactgaaaaaaagagagccgatttttcggttggacagagatgggaaacactttagatgcaaaaagagaataaactttcacgaggactatcagggcggcatattcgtttcatggcgctaggctctgctattgggacagggcttttttatggttcagccgcggcgattgaaaaagcaggccccgctgtacttcttgcttatcttattggtggtgccgcagtatttatggttatgcgcgcattaggggaaatggcagtccatcatccagtggcgggttctttttcacaatatgctagccattatatgggaccattagccggatttttaactggctggaactacgtttttgaaatgcttatcgtttgtcttgcagacgtaaccgcatttggtttttatatgaaactttggtttcccgatgtcgaccaatggatatgggtattaggcatagtctgttttattggtgccttaaatttatgtcatgtgaagatatttggtgaaatggaattttggctctctatcgttaaagtgactgcgattattgccatgattatcggtggtgttgccataatgatctacggctttggtcagcaaacagaacatccaattggtatttctaacctatgggagtttggtggctttatgccaaatggtatagaaggcattattgcctcactcgccattgtgatgtttgcatttgggggtattgaggttattggtattaccgccagtgaagctaaagatccagaaaaaacgatccctaaagctatcaatgcggtgccatttcgtatcttactattctatgtactgaccatttttattttaatgtgcatcttcccatggcaacaaattggccataacggtagtccatttgtacaaattttttccaatctgggtatcaattcagccgctaacattcttaatcttgtggtgatcaccgccgctatctctgccataaacagtgatattttcggtgctggtcgcatgatgtacggcatggcacaagaagggcaagcacctaaatcctttatgaaactgacgcgtaacggtgtgccttggatgaccgtattagtgatgtcagtagtgctattattaggggttgtgcttaactatcttattccagaaaaaatcttcgtacttattgcctctatcgcgacatttgccactgtatgggtctggttgatgatcttactttctcaagtggctatgcgtcgccaaatgagtgctgaagaggcgaaaaaactaaaattccctgtaccattttggccaatagcacccgccattaccattatttttatggcatttgtgatagcaattttaggctactttgaatcaacccgaatggcattaatcgttgggttagtatgggtggctattttaactgttggttactatattggtatcaaaccaagaataacgcagaaataatctactgttatcaagaaaaataaaggctgtgagtcattcacagccttttctttatccattatctgcgctcaatataattaggctagcgcttgggttaaatcagcaattaaatcatcaacgtcttcaagaccgattgataaacgaattaatccatcactaataccatggcgttgacgctcttgtgcactgtatgtcgcatgagtcatagtcgcaggatgctgagccaatgattcacaatcacctaaactcaccgctcgagtaaaaagcattaagcgattaagaaattctctgccagcttttattccaccattcaactccatacttatcatgccaccaggtaacgccatctgctttttggcaagttcatattgaggaaaagagtttaatccgggatatgaaatcgttgccaccttaggatgattttcaagaaattgcgcaatacgctgcgcattctggcaaattttttccattctaatgctaagcgtttttatccctcttaagacgagtgctgcatcatgaggtgataaacaagcccccgtcatatcttttaagccctcaacgcgaattttatctgctaattgataattagtgataattgcgcccgccatcacatcaccatgacctgataaatatttagtcatagaatgtacgacaatatccgcgcctaaggttagtggcttttgtaaataaggcgaacagtaagtactatcaaccatgactaaaacatcatgttggtgcgcaatattagcgatcttttcaatatcactaacccgcatattaggattagccggtgtttcaaagaaaataagctttgttctatctgtaattgcttcggctaatttttcaggatcggttaaatcaacatgtttgatagtgataccaaatttagccagcccatgattaaagaaagtaaaagtacaaccataaacggtcatatcagcaatgagttcatctcctggctgcaataatgaccaacatgttgaagtgatagctcccataccggaagaaaaaacaacagaagcgtctccttgctctaactgagctaatcgtttttctaataaatccaatgtagggttagatatacgagtataaaaatgccctttttctttcccagcaaaacaatcagcaccatattgagccgtgggaaatgcaaaagtggacgtttgaaaaacaggaggcaccaatgccccctgataatctaacggagagtagccataatgtattgcttgagtattaaaacacttattactttgcgtcattatatctccttgacattaattaaacttctattttctgattattttccccaataatttgtaatgtccttagtacaatagttaatccttttaaggtgtcaggattttttaataatgaaaaagtcgcacctaaggtatattttttatcctgataaagagattcttttttagccatattaaaggccgtagttaattcccaaaccggaattaatgtttcttcaaaagcaaccgccaatttttctaccgttgcgttatccataatatcgacggtatctgaggctaaggataataaatcaacaatattatctaggcgctttaatgctaataaaggccttattttttctagtaaatgttctaaatgaattttatcttcattagataacaacggtttttcatttgggcttaaattattttcactcattattttattcccctacaataatcctctgaccgttgcccaatataagccccggttataaccgttacgtaacatgccaccgagttttgttggaggtgttggaataacatcatgtttatagtcatactgtaatggcatacccgctgataatcccatttgggcaacagcttgtactcgaccatcataaattgcagccggataaccataacgcagttcaccacaaatattattagctataacacccgcttggttatgacagctaccaccggccttactaataggcaaatcaaccgtatcacctaacacataaacttgatttaacccatatacctgtaatgtttcagggtcggtcggtagccagccttcaccattgttatattcacttaatcctgtattacgaatggcttctaccgctgttataggaggtgtgctcattaagatatcaaaaggctctgcttctccttctttcgaataggcgattttcttatcaggatcaacatgacttaatgtaaaaccacgctttgctttgatatctcgttcagaaaagaccgcaggaagtacttcacaaacttcttgctgcataaaaagacaatttcttaatagttgagctacggtaggataggtataaacaatttctatattacttcttacccgtcgctgacgtaaaaattcatccagcatcaaggttgtttccattggtgcaataccacattggtgaggtacatttggcgtttcagggaaagttaccgtgataaatacacgccctttttcaatggtagcaattttatctgctaattttcgtgcagcttcatattgataaaaatgatttccagcttcagctaaaccttcaattctatcaagacgaggaacacatcctgtggctaatacgagaaaatcatagtgatattttttcttagaacaacaataaactgttttattattaaaatcgaaactttcagctttatctataacaaattcaatttctggtcttaataaacttctttgtgatcgcattaactcttcttttaagaaaaggttaaatgcaatatacataaatgcaggtttgtaataatggtatggattatctgaaataagcgtaatttttattttttttgaaaatatttcatcatttaattttttagctaagatattagcgagaatagtaccccccgtaccaccgccaataataactatattttttgttgccatattatttcctatatttgtagggaattagatagacaaaaaaagtatagtaaagcgcgttaatataacaaatagattaaatagatagataaattaaatatagagtaataatactaatcaataataaatacaatcatattatattaaaatatttatattttaatattaacgaatgttattatcacgagttaagaaaaggtcgccaccaaaggattatgatcagatgcatctgtgattaagatttccgctttatttagtgataatccacgataaaatatataatcaagtggcttaccaaaagcgcgagtgcgtaaatccttttcaaagatcacttctttaagttttaatcttctagcaaaacgctttaacacattaactcttggacgactccaagcgttaaaatcccccgccaaaataacaggccctttatgatcgatgatatgagtcgataagctgtttaattgtctttgataaacatcaacaccgaaactaaaattgatcgcgtgtacatttatcaccattaaatgctcaccagtaataagtggataaaccgtaattaatgcagatttagcaagccttaaaaaaggctctttttctcttaatgggcaacaatagataggatgagaacttgataaggtcataacacccgcagggtgctgttgaaaggctaaagcaggaacttgatcagcaattaaatggtttttacccgcaaaacgaactaattcaggtgttgtttgcgcttcttgtaaaagtaatagttgagtatcggtggcaagcgtttccagcatactacgccaattgacccgttgctgtttgtaaatattccaaacagcaatttttaaagtgccttctgtatatagtggcatcccaatcggtagcatctcttctatttggcctaaaggtagactaggttcaatcctttctacaggttgacctgctacaaaacgtactgaataagtcggttttttcgccattaagcaacctcagataaccaataggatctcttgctacctatctagtataccaaagctgggatctcccctcacccttttaaagaatataatgataaataagtgtaactatttttgtaaaaaatagctttaatggcgaattattatgaaataagcacaggtaatgtaggcaactttaaattttaaacaaaaaaaaacctaagtcattagacttaggttttcttatgtgttggcggaacggacgggactcgaacccgcgaccccctgcgtgacaggcaggtattctaaccaactgaactaccgctccgcttattctttacgcacttaacgtctttttacattaaggctttaatttaatgcttggcagttccctactctcacatggggagaccccacactaccatcggcgctacggcgtttcacttctgagttcggcatgggatcaggtgggaccaccgcgctatggccaccaagcaaattcggttttaattacccgttatcttctgttatcacagtctataaccagtaattcaatcttgaacaagctgacttcatcattttgtctctctgacaaaacactttcggtgttgtcaggttaagcctcacggttcattagtactggttagctcaacgtatcgctacgcttacacacccagcctatcaacgtcttagtcttaaacgttcctttaggtcacttaaagtgacagggaagactcatctcgaggcaagtttcccgcttagatgctttcagcggttatctcttccgcacttagctaccgggcaatgccattggcatgacaacccgaacaccagtggtgcgttcactccggtcctctcgtactaggagcaacccctctcaatcttccaacgcccacggcagatagggaccgaactgtctcacgacgttctaaacccagctcgcgtaccactttaaatggcgaacagccatacccttgggacctacttcagccccaggatgtgatgagccgacatcgaggtgccaaacaccgccgtcgatatgaactcttgggcggtatcagcctgttatccccggagtaccttttatccgttgagcgatggcccttccattcagaaccaccggatcactaagacctactttcgtacctgctcgagccgtcactctcgcagtcaagctggcttatgcctttgcactaaccgcatgatgtccgaccatgcttagccaaccttcgtgctcctccgttactctttaggaggagaccgccccagtcaaactacccaccagacacggtccccgacccagtttatgggcctaggttagaacatcaaacgttaaagggtggtatttcaaggttggctccatgcagactggcgtccacacttcaaagcctcccacctatcctacacatcaaggctcaatgttcagtgtcaagctatagtaaaggttcacggggtctttccgtcttgccgcgggtacactgcatcttcacagcgagttcaatttcactgagtctcgggtggagacagcctggccatcattacgccattcgtgcaggtcggaacttacccgacaaggaatttcgctaccttaggaccgttatagttacggccgccgtttactggggcttcgatcaggagcttcgccttacggctgaccccatcaattaaccttccagcaccgggcaggcgtcacaccgtatacgtccactttcgtgtttgcacagtgctgtgtttttaataaacagttgcagccagctggtatcttcgactggcttcagcgccgtccgcaagggactttacctaccgccagcgtgccttctcccgaagttacggcaccattttgcctagttccttcacccgagttctctcaagcgcctgagtattctctacctgaccacctgtgtcggtttggggtacgattgttggtaacctgaagcttagaggcttttcctggaagcggggcatcaattgcttcaccaccttggtggttcgtcatcacatctcagcattaagtgaccggatttgcctaatcactctgcctacctgcttgaaccgggacgaccgtcgcccggacaacctagccttctccgttcccccatcgcagttaccaccagtacgggaatattaacccgtttcccatcgactacgcttttcagcctcgccttaggggtcgactcaccctgccccgattaacgttggacaggaacccttggtcttccggcgtgcgggtttttcacccgcattatcgttacttatgtcagcattcgcacttctgatacctccagcatacctcacagtataccttcgcaggcttacagaacgctcccctacccaacaacactttgtgtcgctgccgcagcttcggtgcatggtttagccccgttacatcttccgcgcgggccgactcgaccagtgagctattacgctttctttaaatgatggctgcttctaagccaacatcctggctgtctgagccttcccacttcgtttcccacttaaccatgactttgggaccttagctggcggtctgggttgtttccctcttcacgacggacgttagcacccgccgtgtgtctcccgtgataacattcttcggtattcgcagtttgcatcgagttggtaagtcgggatgaccccctagtcgaaacagtgctctacccccgaagatgaattcacgaggcgctacctaaatagctttcggggagaaccagctatctcccggtttgattggcctttcacccccatccacaagtcatccgctaatttttcaacattagtcggttcggtcctccagttagtgttacccaaccttcaacctgcccatggatagatcaccgggtttcgggtctataccctgcaactcattcgcccagttaagactcggtttccctacggctcccctatacggttaaccttgctacagaatataagtcgctgacccattatacaaaaggtacgcagtcaccccatcctcaaatgtcccgcttgcctttgcgttcaatcttgcccgattttttaacttccgttgctcgtgtacttctaggtacactgcgcgacggcttgaaaaaatcgaccaaccttgttagcaaattcggcgctattttcggtgatgttattgcatcactcagtgcgaggcacttgagtgatggggctcctactgcttgtacgtacacggtttcaggttctttttcactcccctcgccggggttcttttcgcctttccctcacggtactggttcactatcggtcaatcaggagtatttagccttggaggatggtccccccatattcagacaggataacacgtgtcccgccctactcgtcgagttcacaataacagcatcttcagatacggggctatcaccctttactgccggactttccagaccgttctcctgacactgctattgattaagactctgggctgctccccgttcgctcgccgctactaggggaatctcggttgatttcttttcctcggggtactgagatgtttcagttctcccggttcgcctcattaacctatggattcagttaatgatagtatccattggatactgggtttccccattcggatatcgtcgggtataacggttcatatcaccttaccgacgcttttcgcagattagcacgtccttcatcgcctctgattgcctaggcatccaccgtgtacgcttattcgcttaacctcacaacccgaaagtgtctctttcaaagactatctgggtggtgatggctgcgcagattacatttcttcgttgggcagtgctcgcaatgctcacatacttaagtatgctgcgcttgctgtgcgctgtccgcctcgaactgtaaattgctcgctcatcccactttgatgtcaaaacacattcaaagtttgagattttgagagactcaccaatatacctcgttgatatattgatttgttttcaatttttcagcttgttccagattgttaaagagcataataagtaagataactcgtttgaattagcttagttattctctgactctcgtcagataagtggtacgcctttcactcataccgcgcattggcgtcccctaggggattcgaacccctgttaccgccgtgaaagggcggtgtcctaggcctctagacgaaggggacttctgtcagcttcgcagacgcgcttttgctcgttcttcatcagacaatctgtgtgagcactgcacataacacgtatctcttaggtaaggaggtgatccaaccgcaggttcccctacggttaccttgttacgacttcaccccagtcatgaatcacaaagtggtaagcgccctcccgaaggttaagctacctacttcttttgcaacccactcccatggtgtgacgggcggtgtgtacaaggcccgggaacgtattcaccgtagcattctgatctacgattactagcgattccgacttcatggagtcgagttgcagactccaatccggactacgacagactttatgagttccgcttgctctcgcgaggtcgcttctctttgtatctgccattgtagcacgtgtgtagccctactcgtaagggccatgatgacttgacgtcatccccaccttcctccggtttatcaccggcagtctcctttgagttcccaccatcacgtgctggcaacaaaggataagggttgcgctcgttgcgggacttaacccaacatttcacaacacgagctgacgacagccatgcagcacctgtctcagcgttcccgaaggcactcctctatctctaaaggattcgctggatgtcaagagtaggtaaggttcttcgcgttgcatcgaattaaaccacatgctccaccgcttgtgcgggcccccgtcaattcatttgagttttaaccttgcggccgtactccccaggcggtcgatttaacgcgttagctccagaagccacggttcaagaccacaacctctaaatcgacatcgtttacagcgtggactaccagggtatctaatcctgtttgctccccacgctttcgcacctgagcgtcagtctttgtccagggggccgccttcgccaccggtattcctccacatctctacgcatttcaccgctacacatggaattctacccccctctacaagactctagccaaccagtttcagatgcaattcccaagttaagctcggggctttcacatctgacttaattgaccgcctgcgtgcgctttacgcccagtaattccgattaacgcttgcaccctccgtattaccgcggctgctggcacggagttagccggtgcttcttctgcgggtaacgtcaattgacaagggtattaaccttatcaccttcctccccgctgaaagtactttacaaccctaaggccttcttcatacacgcggcatggctgcatcaggcttgcgcccattgtgcaatattccccactgctgcctcccgtaggagtctgggccgtgtctcagtcccagtgtggctgatcatcctctcagaccagctagagatcgtcgcctaggtgagcctttaccccacctactagctaatcccatatgggttcatccgatagtgcaaggtccgaagagcccctgctttggtccgtagacattatgcggtattagccaccgtttccagtagttatccccctctatcgggcagatccccatacattactcacccgtccgccgctcgtcagcaagaaagcaagctttctcctgttaccgctcgacttgcatgtgttaggcctgccgccagcgttcaatctgagccatgatcaaactcttcaattaaaagtgtttgatgctcaaagaaatcgaaaacttagcttattcattatatgaattaacttgttagtcactcttcaagacttgatacatctaattttttagaagatatcgtctctgcgagtgcccacacagattgtctgataatttgttaaagagcagtgcaactatcgctgccgtttccggtcttctgcgttgttgcgaggaggtgcattctacatcttcctcattcagtgtcaagcgctaatttatcaggcttttcactttttattttgttctctcagccggttcgcttagcgccctgtgccgtgacaacgaggacgcattatagggagttttctgaggctggcaatagttttttgaaaaaaaatgtttgtttgttggttaattaaacgaagtgcctattttttgtggcttttaagccattttggcaagtcggctaagctatctagaacaaaatctgcacaagtttcggcctcttctgtaatcgcttttcctgtgcgaacgagaattttatgcccaactccagccgcttttgctgccaacatatcttcttttttatctcccaccatataagaagatgccatatcgatgtttaattgtgctttcgcatccataaacatacctgttgcaggtttacgacagtcacactcttttttgtattcttctataattgcatctggatgatgtgggcaataataaatgccgtctaaatcgacgcctcgatcagctaaagaccaatccatccattcagttaaatgtaaaaactgatcttcactataataccctcgaccaatacctgactgattagtcactagcactaaagcatatcccatggcttttaattcagccattgcttcaatcacaccttcgataaattcaaagttatcaatttcagatacataaccatgatcgatattaatcgttccatcgcgatctaaaaaaatcgcagaaatccccttgctcacagcattactccttttagatatttgcgcttagtatcgcatgttttttcttatatagagaagcatatccacctttctttcttttattgactattattacctattacgcttctgctcttttttgttgacttggacgtctagacgccttaacatctattttaactcgggcagaatagcgtgaatgtcccatattctacttatataaagaacaagatgattaaactgacgaatataaataaagtatttaagcagggagcgcgttcaatacaagcgctatcaaatattaacctgcatgtgccacaagggcagatttttggtgtgattgggtcgtcaggtgcaggtaaaagtactctcatacgctgtgtaaacatgttagaaaagccgacatcaggtgaagtttgggttgatggtcgtgatctaacaaaattatctgataaagaattaaccaaagcacgtcgtggcattggcatgattttccaacattttaatttactgtcctcaagaacggtatttgataatgttgccttacctctagaacttgataacacgccgcgtgcagatattaataaacgtgttaatgagttattagaattagtgggtttagcagataaaaaagagtattaccctgccaatttatcagggggacaaaagcagcgtgttgcgattgctcgagcattagctaattcaccaaacgttttattgtgtgatgaggcaactagtgctcttgatcccgcaacgacgcgttctattttagaactgttaaaagatattaatcgtcgtttaggattaactattttacttatcactcatgagatggatgttgtaaaacgtatttgtgaccaagttgccgtgatcagtggtggtcaattagttgaaagtgatgcggtaagtgaggttttctctcaccctaaaacacccgtttctcaagcatttattcaatcaacattacaattggatattcctgacgattataaagaacgtatgaagccagagtgggaagaaggcttattcccgctgttaaagcttgaatttaatgggttatctgttgatgcgccattaatgtctattgttgctcgtcgttttgatgctgatattaatattttaagttctcaaatggactatgccggtggagtaaagtttggcgtgatgctagcagaattacacggtaaaaatggtaacacagaaaagtctatcgcgtttttagaagagcatcatgtgaaagtagaggttctcggttatgtctgaaggaatgatttatttattaattagtgggatctgggaaaccttagtcatgacatttgtctcaggcttttttggttttgtcattggattaccattaggtgtcttactttatgtgactcgtccagagcaaattatggcgaactcccccgcttataaagtgatttctgctttagttaatatttttagggccatcccttttattatcttattagtttggatgatcccttttacacgtatggtagtaggaacatccattggtttacaggcggctatcgttccgttaactgtaggagctgcaccttttattgcacgtatggtagaaaataccttattagaaatacctcatggtttaattgaagcttctcgtgccatgggggcaacaccaatgcagataatcaagaaagttttattaccagaatctttaccaggtttaattaatgctgcgaccattacactcattacattagtcggttattccgcaatggggggcgctgtgggtgccggtggtttaggtcaaattggttatcagtatggttatgtgggctataatgccacagtaatgaataccgtcattgtactacttgttattcttgtttttatcattcagtttattggcgatcgtttagttaaactgacaacacataaataaatgaattaaaggtttctattcatctactatctaatcaataaatgtagtttgtatgaaaccttttatttaaccagttcaaagaaagggtaaatctatgtcattgaaatttaaatcacttgctgtagtcagtgcgttagtcggtgctttagctttagcaggttgtggcgaaaaagaaaaagatcccaatcatatccgtgtgggggttatttctggttctgaacaacaagttgctgaagttgctaaacaagtcgctaaagataaatatggacttaatgttgaactcgtcactttcaatgactttgtcatgccgaatgaatcattaagccgtggtgatattgatattaatgcctttcaacataagccttatttagatcaacaaatcaaagatcgtaattacaaaattacggctgtaggtaatacctttatttaccctattgctggttattctaaaaaaataacggatttagccgatttacccgatggtgcacaagtggctatccctaatgatccaaccaacttaggtcgttcactgctacttttagaaaaagtaggattagtgaaattaaaggaaggggttggtttattaccgactaaactggatatcattgaaaatccgaaaaacatacaattagttgagttagaagcaccacaattaccgcgctctttagatgatcaaaaaatctacttagcggttattaatacaacctatgcgagtcaagttaacttaactccagcaaaagatggtatttttgttgaagataaagattcaccttatgtcaatattattgttgcccgtgaggacaataaagatgatgaaaatgtgaagaaatttattcaatcttatcaaacagatgaagttgatagcgctgcgaataagatttttaacggtggtgcagtaaaaggttggtaatcatctcacaactcaacttaataataaaaaaggcggacatttgttcgcctttctcttttttactgggctaatttgcattaaattagggcggtttaatttttgtatagacaataataaagaggatatacccatgcacatgcgcttgctacttattggcattatagcgctgtttatgaccggctgttcaatgcagaaatcatctgatgttgatcagtctaagtttacggatatgcgtttaaataaacctggccaaccacaaaagcccaaacagcaaactttatctcctgttcgcattgttgaaaaaacagaagatcttttaggtgcgccttttaaagatttaggtgttgttgccggtgaatcttgccgacaaacactacaagatccacccgcaagcttacctgctgcgaaaaaaagaatggctatcaaagcggcttataaaaatgcgaatgcagttttattacatgaatgccaaatagtcacaggaatgggttgctatcaatcggcaatctgtgaaggttcagcactattaattactcaatgaatagctaccaaataacatctatagggcatattatcagcccttataaagagaaatttgccgttcctcgccaacctggattagtccaggatggcgtaggccagctaatactacacacaccttataatcatcctgatgcagtaagaggcttagaacaatttagccatctttggttattatttatttttcatcaaacagcgcaacaaggttggcatccattagtgcgcccgccaagattaggggggaatagcaaactcggggttttcgccactcgctcaacttttcgccctaatgctatcggcatgtcattagtcgagctaaaagatatcattattgaaaagcaatcggtgattttgcaactaggcagtctagatcttattgatgggacccccattattgatatcaagccgtaccttccctatgctgagtctattgcggatgcaacagcaggctttgcccaatatgctcctcatgaagagatggagattcttttttctgaagatgccacacagcagttacaatattactctcatcaatatcctcatcttatgcgatttatcactcaagtattgcaacaagatccgcgtcctgcttataaaaaaagcgaacaaagtgatagagtatatgccgtgcatttactggattttaatattcgttggcaagtcaatgggcagcaaacacttgttcttagtatagaaccgcgctaacttgcacttactaacattgaaacttcttgtctttaagcaaatcagattgaaaaaaatgctttgcctcttttggcaaacctaagtcactggtagactaaagactttctctatttatattgatgtagactggcctgacagtcagcctaagtatttttgttctaatggaacctaataatgcgtactagccactatttgctctctactttgaaagagacgcctgctgatgccgaaattgtcagccatcaactcatgcttcgcgcaggtatgatccgtaaactcgcatctggtctttatgattggatgccgaccggtgttcgtgtcctgagaaaaattgagaaaattgttcgtgaagagatggacaacgcaggctcacttgaaatttcaatgccggttgttcagcctgctgatctatggcaagaaagtggccgttgggaacaatatggcccagaattgttgcgttttacagatcgtggtgagcgtccttttgttttaggtccaacccatgaagaagtggtgaccgatattgttcgtaatgaaatcacctcttacaaacaactaccactcaacctttaccaaattcaaactaaattccgtgatgaagtacgcccgcgctttggtgttatgcgttcacgtgagtttatcatgaaagatgcctattcattccatatctctcaagagtctctacaagagacttacgacagaatgtatcaagcctatagcaatatctttactcgtattggtttagacttccgtccagtattggctgatacaggctctattggtggtagtgcctctcatgaattccaagtattagcagatagcggagaagatgatatcgtattctcaacagcatctgactatgctgctaatattgaattagcagaagcggttatgccagcaacacctcgttcaccagcaacagaagagttacgtttagtagatacaccaaacgcaaaaactattgctgaattagttgaacaatttaatctgcctattgaaaaaacagttaaaacacttattgttcatgcaactgaagaaagtggtcataaattagtggctttattagtccgtggtgatcatgagctcaatgaaataaaagcagaaaaatgtagcattgtcgcttcacctttagttttcgcgactgaagaagagatccgccaagctgttaatgcaggtccaggctctcttggtccaattaacttgccattaccaatcattatcgatcgcgctgtatctgttatgagcgattttggtgctggtgcaaatattgatggtaaacactactttggtattaactgggagcgtgatttacctcttgctgaaatggcggatatccgtaatgttgtcgaaggtgatccaagcccagatggtaaaggtactttacttatcaaacgtggtattgaagtcggtcatatcttccaactaggtaagaaatattctgaagcattaaaagcaacggtacaaaacgaagaaggccataaccaagttgtgactatgggttgttatggtattggtattactcgtatcgttgcagcggcaatcgaacaaaaccatgatgcccgtggtattatctggcctgatgctatcgcacctttccaagttgccattttaccaatgaacatgcatcgttcttatcgtgtaaaagaagtagcagagaaactctatgctgacttacgtgcacagggtattgatgtattatttgatgatcgcaaagagcgcccaggtgtgatgtttgcagatatggaactgattggtgtaccacacaccatcgtgattggtgatcgtaatctggataacgaacaagttgagtataaagcacgccgtagtgatgataaatctctggtcaatgtgaatgatgttgttgcctttattaaagagcaactggtttaatccatttaatattgtttagcccttatgggctaaactgaccaaacttaacgactgctgttaccacttttgttaacgtaaaaaaaaccgctttatttaaagcggtttttttataatgaattaacttctgctattacgacggctattgcaagagccatgacgatcaaagcgtggtttattatcggtaaccactaatgcacgatcatactgtccatcttccattgaaggacgaatactatagtaacctctgacctctagatagacaggtgttccgccatcaacgcctgtagcaaaatagcctttttctaatactaatccatcagcggcatagacacgtccagattggcaatctttaaaggttccagcgtcagcaaaataggtaaattcacccgctaactgcttaggttgaacctttgctaaggtataattaagacccgaattaattacattaccatcgatatccaacataactaatttatcttcacgaggtaaatagtaactcttctcgccataactattagtcaaggtcagtttatctttacttaatgaccaagtacctgactcaaaaaaacttcgattgtcatcagaagtgccttggtaactttgctccattacataagagccatcttgattgacaagaatagtcgtgtcgataccagaacaatcggcacaaggtagaatactgttatatgtttgatcaacaattttaccatcgagtgacaggccaatattattctggcagcctgacataataaataaccctgcagcaatggctgcaaataaaagttttttccccatcatcaactccctaagttctgggtactttctaatttctcgttttcaatactagtttagcatttttttaagcaaaaagggtgaataaaaccccctttaagataattacactacgttttagtataaattcttaaatcttgtcgcagaatgcactatttcagaaaattatcacaataactattgtgatcacttcgaataacagcataatgattttattctgaattattcactggcggcaataccgccacgaacgagtggtgagggaatatgtcaacaaatacagaatatcaaccaattaattgtgatgattatgaatatttggagttagcttgccaacgaggcttaacactccatattgaattacataatggtgagcaaattgatggtgtcgcagatgatctctttttaagtaaaaaagttgaatatctgaaagtaaaaacatctgagggtgcaaaagatttacgactggatattattgccagtttttctcatcccgaacttggcactatcataatcaaatctgaataactatttacataaacaaccgccgtaattggcggttgtttacgacgcttgccactcaattgttatactttgttctgttgttgcatttccctctaaagtcacaaaagtattaaccgctgcaattaatgtatcgttataataaatcaatgggatacgagttctttgccatggggcaatattaagctcttgccaaattttcttgcttgatctggccaaatctcgcccaacaatacgtaaagatgaagccgttaagccaaaacgaaccgtcactttttcatctgctaacggtgctctgcagattgttttaccgctatcacgactcaccgctaatatccctaactgattaggcaaaattaaaggttgtgataatgaccattcgataaccctatccgttagttcttccataactggcacaagatagaggcgttgttgataacgcctaacttcatcttggaaaaaacgtaaccgtggctctgcatctgctttagctaaagcaacttcttgccatagccgcgacaattgagatcttgatggcatgcttttattacatttagcaaaccaacgacgcaacaatgcattacgttttatttcgctacagcgggacaataaattgatatctaaactctgatgctcatcaatcaattgctgcaattctacatcgagtaactcatctaagagcgcttcttgttcaccacacagtgcggcactacgagtaactgcttgagaaaaatgtggccagcgctgagtcaatagaggcataacatgtaaacgtaagaaattgcgatcatagcgatcatcttgattactatcatcctcaatccataataaaccgtgctcatgtgcataagcttcgatttgttcacgtgtaatattaagtaatggtcgtaataaatacccttgttcaaaaggcatttttgcaggcattgaagacaaccctgccggtccactaccgcgtttaagcgctaataggaaagtttccgcttgatcatcttgatgttgtgccgtcactaaaacttgattaggctgtaaatattggcgataagcttgatagcgcgcttctctggcaccctgctcaatccccccttctttcccattgacttgtactctttcactgataaaactgacctgccagttatgacaaaaatgttcgcaatgcgtgagccaatcatcggcttttgaattcaatccatgatgaacataaattgccgttaattctaaaggaagttgatatttatcacgtaagcaaaccaacccatgcaataaaacggttgaatcaactccaccactaaaacccactaaaatatgagtatgagagccaatttgtcgtttaatttcgttaataagaggacaatttttcagttccatagcattatcagttatcgaggaattcaatgggttatgttaagcctttccattgcattttgcacgaacacaacctttcgccacaacataataaaaaagaaagcagaatatagcttttcacttaagctgataacgatactaagaaaatgctgtcctcatcgctgtcatgggtttaaattatgccgtaaaaccaccatcaacgagataagaagcccctgtgacaaacgaggcagcatcacttgctaaaaaggcaacaacattagccacctcttcaggtgtacctaaccgaccaatagggtgtaaagcgacgagtttttgtttgtctaattcacgcccctctaataaaggagtatcaatatagcctggacaaacagcattaacacgaataccttgactggcataatcaagcgctaacgtttgtgtgagtaatttaatgccccctttagaggagcaataagcaggaaatgcatgctggccgacaaaagagcagattgaactacagttaacaatagcgcctgtggttttagtttctaaccaatgttgaataaccgcgcggttaataagaaatagtccattaagattaacatcaagcacttttttccattgatcgtaatgtaatttatcggcaacggtatcggttaaaacacccgcattagcaaataaaaaatccactttgccataatgttttactacatgcttaaccagttgttgattatcttgctcattggcggcatccatttgaacaaattctgcggaaaaccctttatcttgcaaatagttttgtgctttttccccacgacctgaatgacttccagtaataacaaccgatgcccctagtgataaaaatttctcagcgctagctaaaccgataccactattacctccggtgataatgcctactttgttgctaaatgaaatcataacttttccttctttgattaacgataagccttatcaaatcataggtagggttacgtattttttaagcaaagataaacataaatcttatatttgagatcgagttaacatattgatatataattaaaaatgaaagtatcacaagctattactattaacaatagaaatagttttataaaagaaaaattagctggagtgatagtggtgtgataatagcctgatcctattcgccataaaaaaaaccccatgctatagcatggggagtgatctttttaatggctagctaagtacccgctcaatcagcaatagccatattccattaagcgttgataacggcggttagtgagttcttctgtatcaaactcatctaactgcgctaaatcagcttttagctgtgcttttagtgatgctgccatttcatcataatgacgatgagcaccacctaaaggttcagggatcaccgtatcaatcaattttaattcttttaaacgatttgccgtgatccccatagcttcagcagctaatggtgctttatcagcactcttccatagaatagaagcacaaccttctggcgaaataacggaataggtgctgtactgcaacatattcactttatcacccacaccaatcgccaaagcaccaccagagccaccttcgccaataacggtacaaataattggcacaccaaagcgagacatttctcttaaattacgagcaatcgcttctgattgtccacgctcttcagcgcccacccccgggtaagctcccggagtatcaataaaagtgataataggtaatttaaaacgttgtgccatttccattaaacgtagcgctttgcgataaccttcaggagctggcataccaaaattacgacgaattttttctttcgtttcacgtcctttttgatgaccaatgatcatcaccggacgaccgtctaaacgagcaataccaccgacaatcgctttatcatcagcataagcgcgatcgcccgccaactcctgaaaatcagtaaaaacacgattaatataatcaagggtataaggtcttaatggatgacgagcaagttgtgccacttgccatgcaccaagatcagagaaaatttttcgagtaagttctaaacttttttctcttaagcgtgcaacttcttcatcaatattaatatcaattttttcatcatgttggctaactgcggttagcgaatcgattttcgcttctaactcggcaattggctgttcaaaatccagaaaattaagactcataacattcctattctagtcaaattctaattccacctgctcattacccagcagagttcgcagatcggtcaaaagcatatcagtcggcgttactcgccatgttgcaccaaaacgcaaacgtgcacaggcatcatgcttttgaaaataaagatgaaccgggatcgtgcctgaacgatgaggttctaaaacgccgcgaagacgatttaataattgctcattaatttgcctgtctgataacgagatagcaagccctcgagcatatttttcacgcgcttcgttaatatccattaattcgcggactgtcattttaagcccaccgttgaaatcatcaaagctgacctgcccggtagcaattaaaatccgatcttgttccaatagatgttggtatttatctaatgcatcggaaaataacataatttccaaacgaccagaacgatcatctaacgtacatataccaattctattccctcgtttagtggtaaagactttcgaagcaaggactaatcctgccacttttaccatctgacctcggggggtaggtactaaatcttttagacgggttcctgccgcatatcgttcaatttcttttagataacgggtgatgggatgtcccgttaaatataaaccgagggtttctcgctcaccttctaaaacaacttgatctggccatttaggtacattggcataagaacgttccacttgctctggggcttctgccaatacaccaaacatatcggattgcccaatggcttccgcttttgcgtgttgatctgccgcctttaaggcatcttccagcgaagacattaatgctgcacggtgaggccctaatttatcaaatgcgcctgacattatcagtttttccatcactcggcgattcaattttttggtttctgttctcgcacagagatcaaaaatatctttaaaatgaccaccttgttgacgcgcttcgacaattgcctcaatagggccttctccaacccctttgatggcccctatgccatacactatttcgccttcatcattaacatggaaatgataaagcccactattaatatctggaggaaggacttttaaacccattcgccaacattcatccaccagaccgaccactttttcggtattatccatatctgcagtcatgactgccgccataaactccgcaggatagtgagcttttaaccagagcgtttgataagaaactaaggcataagccgctgagtgcgatttgttaaatccataaccggcaaatttctctaccaagtcaaagattttcatggctaattcgccatcaacaccgtttttaatcgcccccgcttcaaacacagagcgctgttttgccatctcctcaggttttttcttacccatcgcgcgtcgtaacatatccgcgccacccaaggtataaccggcaagtacctgtgcaatctgcatcacttgctcttgatacaagataacaccataagttggctctaatacaggctgtaagctctcatgttgccatttaacatcagggtaggaaatctcttcaacaccgtgttttcggtcgataaagttatccaccatccccgactgtaaaggccctgggcgaaacagtgcaactaacgcaatcatatcttcgaagcagtctggtcgcagacgctttatcagatctttcatgccacgggattccaattggaataccgcggtggtttcagagcgttgcaacatatcgaagctacgctgatcggttaatgaaatggctgatatatcaacaggctcaagtgattttttagcccgccgagcattaatcatttctaatgcccagttgattatcgtcagtgttcttaaccctaagaagtcaaatttaacaagaccggcatattcaacatcattcttatcaaattgtgtaaccgggttattcccttccggatcgcaataaagtggcgcaaagtcggtaattttggttggagaaataacgacaccaccggcatgcttacccgcattacgggttaccccttctaatttacgcgccatatcaataagcgatttcacttcttcatcagcttcgtaaatttcaggtaactgaggctcggcggcaaaggctttttctaacgtcattcccggatcagggggaacaagcttggaaattctatcaacgaagccataagggtgtcctaaaacacgcccaacatctcgaataacagctttggccgccatagtaccaaaggtaatgatttgcgatacggcatcacgaccatacatatccgcaacgtgatcgataactctatcgcgcttctccatacagaaatcaacgtcaaagtcaggcattgatacacgttctggattaagaaaacgttcaaacagtagatcaaactcaagaggatcgagatctgttatcttaagcgaataagccaccagtgagccagcacctgaaccacgtcctggccctacaggaacaccgttatctttagaccactggataaattccatcactatcaaaaagtaaccggggaatcccatctggttaataactttaagttcaatctcaaggcgctcatcgtattcaggacgtcgcttttctctctcttgcggatcaggaaataaaaaggcaaggcgctcttctaagccctctttggactttttaattaagaaatcttctgtactcatatccccggtcgggaattgaggaagaaagtattcacctaaacgaatggtcacattacagcgtttggctatttcaacactgttttctaatgcttcaggaatatcagcaaaaagctcacacatctcttcttctgtgcgcatatattgctgaggactgtagtgtttaggacgtttaggatcggataatgtgaaaccatcatgaatagccacgcgaatttcatgagcatcaaaatcatcactatccagaaaacggacatcatttgtcgcaacaacaggaagccctttttctgatgctaaggctacagcttcgtgtaagtagctctcttcatccggacgcccagtacgaataagctctaaataatagctatcaggaaagtgcgtttgataatattcaagacattgctcaactaaagctcgattaccgcgtagtaggaatttaccaacatctcccattctaccgccagaaagcaacaagagaccttctttatatgttgttaaccactcttgtttgataaccggtccggcagcaccataaccatgtttataagcttcagaaatcaatagtgttaggttttgatatcccacattatcacgggcgagaatggttaaatgcgcgtattcatcacctaatagttccgtttccagatagacatctgcaccaacaataggtttgataccggcaccatgagccgctccataaaatttcactaacccacataagttagtgaaatctgtaattgcaaaagcaggcatacccagcgaagccactttcttcacaagaggccctgtttttgccaatccatcgatcattgaataatcgctgtgtacccttagatggataaaacgaggatctgccatatcttattaattactctgtggattagactaaatttaaagcacgttttacaggcgcaaaacttttacgatgataaggcgttgcccctaatgaagccagtttttccatatggaaggctgttggatagcctttatgtttggcaaagccgtaatcaggataaagtttatctagctgttccatttccctatcacgggtaactttagccagtattgacgctgcgctaatttcttgaactaaactatcacctttaatcaccgcttgagatgccattggcaagttaggacaacggtttccgtcgactaagaccatatcaggcgttatggataatcccgcgacagcacgctccatggctttcatcgttgcccaaagaatattcagtttatctatctcttcaggctcagcacgtccaatagcccaacataatgctttttcttttatttcatcataaagcgcattgcgttttttctcggtcaattttttcgagtccattaatccttgaataggattagctggatcgaggatcaccgcagcagtaactaccgcccccaccaatggtccgcgaccgacttcatcgacgccagcaattaggtttgctttaggatagacaaattccattattgacctgctaattctaaaactgcattcgctgcttgctcatcagcacgacaacggatagctgagtgtaattgtaaaaatatctcttttaagtgttgtgctttttccgcatccgttaatagggggagtaattgttctgccagtgcttctggtgtgcactcttcttgcagcaactctttaattatttcccgtcctgctaataaattgggtaaagagacatagggcgttttaactaatttttttgctaaccaaaaggtaaatggtttcatacgataacccactaccatcgggcatttcgttaacatgcattctaaggcggctgtaccagatgctaataaagtcgcatcactggcggtcatcgcctctcttgcttgtccatctaagagttggatttcaagttttggggcaacactttgatgtatttgttcaaattgtgcccgtcgcttcgcatttaccaaagggacaacaatatgtaatgcggggatctgttgctttaatcgctgcgctgtttttataaagtccgcactgagcatttccacttcagaatgccgacttcctggtagcagagctaaacagattgcctcttgatcaatacctaggtgttcacgagccgcttttttatcagggtgtaacgcaattgcatcagccattgtatgaccgataaagcgacaaggaacctgatatttatcgtaaaacgctttttcaaaaggaaggaaagctaaaaccaaatccgttgctttaccaattttaaaaacccgtttttgacgccaagcccatactgatggactgacataatggatagttttcaaccctttttgttttaagcgaccttcaagggtgatattaaaatcaggagcatcaataccaacaaaaacatctggcttaagttgtgtaaagcgttgagtgagatcttttctgatcttcaataatcgtggcaaacgttcaagtacttccacgacccccatcaccgcaagctcttccatttcataccaagcttcacaaccttctgcttgcatcaaaggacctgcgacaccaacaaaacgaatattgggatgcatttgtttaagagcgcggattaatcccgcgcccaagatatcaccggacgtttcaccagccacaaggccgataactaacggacgctgttttatagatgattggcctgacaaggtcatatcctaattagcgaataataccgcggtttgattttgctgagttttccagaaaatcactgaatatttttacatactgattattattgtctgcggctaattgagcaatctcttctcgcgcttcttcaagcgttttaccattacgataaagtatcttgtaagcgttacgaatggcatgcagatcttcttttgcaaaaccgcgacgttttaatccttcaatattcaaaccataaggggtggcatggtttccttgtgcaatcacaaaaggaggaacatcttgtgctacaccggaacagccgcccaccatgacatgtgaaccaatctgacaaaattggtgaaccgcactcataccaccgattatcacataatcacctaaagtgacatgtccacctaaagtaccgttatttgcaataatacagcgatcgccaatgatacaatcatgagcaacatgggtgttgatcatcaataagttatcattgccaattttagtaatattaccgccttgtgtcgtaccacgatgaatagtgacactttcgcggataagattgcgatcaccaataatgacttgggtcggctcaccacgatatttcagatcttggtttacttcaccgatagaggcaaattggtaaatctgattatcacggccaatgcgtgtatggccattaataaccacatgagatttgatatctgtaccttcaccaatctcaacatggctaccaataacgcaaaaagggccaatgcgaacattagcaccaattaccgcaccctcttcaataattgaagaagggtgaattactgcggatttatcaatcataagctagacctcacggcggcgagcacacatcatctcagcttcgcaggcaatttctccatcaactttagcgacgcctttaaagcgcgcaacgccacggcgttctttaatgaattcaacctcaagaaccatttggtctccaggtaagacaggacgtttaaagcgagcaccgtcaatagcagcaaaatagtaaagttcaccgggttccagttttcctacgcttttgaatgctaaaatacctgttgcctgcgccattgcttcgaggatcagtacaccagggaaaataggtttgcccgggaagtgaccttgaaagaaaggctcattaaaagatacattttttactgctcttagaaatttcccttcttcaaaatcaaggacacggtcaaccaataaaaatgggtaacggtgtggaagtaaatctaaaatttcttcgatttgcagagtatgattatcactcattgcaatactcttcctgtctaataaaactgaatctaattaagaatgacacgacctgctgtgactcaaaaagggagttaacgcgcaggtcgcaaaataggtaacaacaaccgtcaaagatgctacttgttacttgtcgctattttctacttgacgttctagcgactttagccttttttgcatttcatcaattcgcagcaccagtgctgcggttttacgccatgctttattcggttgtaacggaatgccagaagaataaaccccaggttcagtgataggacgcataaccatccccattcctgttaccgtaactttatcacaaatttccatgtgaccattgataacacttgctccaccaatcatacagtaacgcccaatcttcaggctccccgccatgatgacaccacctgccacagcagtattgtcaccaataatgacgttatgtgcgatttggcactggttatcaatgataacaccattaccgataactgtgttatctaatgcgcctctatcgatggtagtacatgcaccaatttcgacacggtcaccaatgatcactgagcctaactgaggaattttaatccaattgccacgctcattggcataaccaaaaccatcagaaccaatgacagtaccagattgtactaaacaatctttaccaatgataacttcatgataaacagagacatttgcccacaaacggctattatcgccgatatgtgcttttttaccaataaaacatcctgcaccaataactacgttattacctaactcaacacctgactcaatgaccgcattggcaccaattgagacgttattccctaatttagcatcaacggcaataacagcagaaggatgtatatcttgtgctggcgcgggcgtagtatccataatctgagccatttgtgcataagccagataaggatttttcaccaccagtgcagcaacaggacaaaaaggaagatcagcctctgttaataccaccgcagcggcctgacattcacttaatttttcacgatagcgactatcggaaagaaaggtaatttgttcaccatttgctaagcccattgaagcaagaccggcgatagtgatatcaccatcgccgtgtaactgtgcattcaattgctgagcaagatcagctaatcgaattgaaaacatctattatttaacctgtttttgaacctgagcagtaatatctttaccgtctgcgaaataaggaacagtgtttgcatctaaaatcacatcataaccttcttttttcgctacagcatcaacagcgtctaatacacgtttcatgattttattacgctcttctgcttgacgacggctaaagtcttgctcaaaagcttgtgctttttgtgcataagcttcacgtttagcaaccagatctttttctgtattagcacgttgtgtcgcattcatggttggtgcatctttttggtatttctcaaccgcagtttgtaatgctttacctaaattttgcaattcggtatcacgtgatttaaattcattttccaattgtttctctaccgcatcacggttaggcactttttggagaacttgaccgatgttcacaacacctactttatctgcagcttgagcgcctgctgacatcgtcaatgccattcctagggcagcggcacataacaattttttcacgatagactccttaaaacccaaaataaattttttgtcagatatgagatgtcttttctcaatatatagaaaaggcatcaactttacttacatcgctaccacgttctaccaatattaaactggaattgctcagatttatcgccttcgtaatctttaattggcttcgcataagagaagactaacggacctaaaggtgataaccactgtaaagccacaccggttgaaacacgtatattacttgccttaccaaaatcaggcataccagcagtccaattagaattagtactgttccagttggtatcccataccgtacccgcatcaacaaacattgaagttctgacggatgaggagtatttatcatcaataaatggcgttggtgtgatcagttcaaagctagccaccgccatagcattaccaccgaccgcatcgctagataatgaaggatcaattatcgtactcccatcatcttttgtaatttttttcaaataaatcgctttaggaccgatattattggaacggaaaccacgtactgtaccagaaccaccggcatagaagttttcatagaagggtaattctttaccccctaaaccgtcaccgtaacctaaacgacctttgaacaaggtgacccaagactctttttcatcaagagggtaataagccataccgtcccaagttactttatagtacttgttatcagagcccggtatagtaatacgtccacttaaattacttcttgccccagaggttgggaagaaaccacggtttaagttattaaatgtccacccaagactgacagtatagtcatccgcattaaaggattcgcgtttatcaaagcctgggttttcccccatactttcaagataacgccacatcgccacttgaggttccatccgtgacaggccgttatgggtatagcctaagccaagacgagccgagttgtattcattgatagggaaacctaaggtgccgtctaacccataagatttattggtatagccggataaatctgcatcattagctcggaaatcgttatagaaaatacgacctcctaagctgacaccatttacagtaaagtaaggatcagtgactgacaattcagcatacgttgagtaatcatttttactggcattaatcgcaacggcattccccgttcctaaccagttatcctgtgttaccccaacttggaagctgacaccactttctgtaccgaaaccgacaccaaagttaagtgaacccgtattacgctctttgacacgataaacgatatcaacttgatcaggagatccgggaatacgctgtgtttccgtttcgactgtttcaaaataacctaaacggtttaaacgctctttaccttgttcaactaaatcgctacctaaccaagccccttccatttgacgcatttcacgacgtaaaacagagtccttggttatatcattacccgcaaaacggatttgacgcacatagaaacgattccctgcatcaacgttaacatgcagttttaccgttttattttcatcattaatttcaggatttgtcatcacccgtggataggcgtatccatagcgacctaatagatttttaatctcattttctgttttggtcacttgagcaccgttatatagtgagcctggtgcgatttggatcagatcttcaatctctttggtatagcctgcggtattaccattgatttcggtactttcaaccgtgtatttatcaccttctttcaggttaatagtaatataaataccttttttatcaggcgttaagctaacgtttgtggattcaatatcaaaacgtgcataaccacgatctagataaaaacttcgtaatgtctctaagtcaccagcgagtttttgtttctgatatttttcatcagccgctaagttccaccaaggcacatcatcacgtagttggaagcggttaactaattcagcagtactaaatgctttattaccaacaatattgatttgttgaatagtagctgaaacaccttcggcaaataccagttttaaatcaacacggttacgaggaagaggagtcacaacaacttttactgtggcgttatatttaccaacactatagtagaaatcttcaagacctttctcaatattagccaacattgttcggtcaagtgtttcaccaatacggatattggaagcatcaagattttgcttaagcatatcttctttaattgctttgttacctgagaaagtaatactcgcaattgttggacgctctttaacttgaacaataagtacatttccgtcacgcagaacccgaacatcatcgaagtttcctgtcgcaaataatgaacggatagttcgactaatatcatcatcactgaccgaatctccaactcggacaggcatgttcagtaatgctgcaccaacggcgacgcgttgaagaccttcaaattgaatgtcctgaactacgaatccgtctgaaccgtatgcagtggcgctgcccagcagcagcgacgctataagcaactttttcatcgccatcgttgttttgtgttttcctaaccggtccctgcttattttattataagcgagagaaatcattgaaaagtgcaagtcccattaacagcatcagtgccataacaccgaaacgataacagacatcttgtacacgctcagataccggccctccctttatcttctcgataaccaggaaaagcaggtgcccaccatctaagacaggcaggggaaacaaattaatgatccccagattgacactgataagtgcgataaacatcaaataataaacaaaacctgaatccgcagacattccagcgcctttagcgatagaaaccggtccactaagatttgttaacttgacatcaccaaccactaacttgccaatcattttgacagtcaaacccattaactgccatgttttatcagatgcttcatataacgctgaaaatgggttgtattgttgcattatcaagtattgctcatctggcggtaatacttgtagcttcgcacccacttgtccaacttcgctaccatctttcagcgctattgctgtaggagtaatatttaacaccaaagaagcaccgttacgttcaactaacacttccaacgttttgttggggctttgtcgaacaaaataagtaaatgggtgccaagtatcaattggctgaccatcgactttaacgatccgatcccctgcttgtaaacctgctttttcagccgcagagtctggtgttacttctacaactttagagtccaaccgtgcgccaacaggcatgatgcctagggatacgataggatcttgtctttcaggatcaaaattccactgttgcaaattcagtatattctcactctcagaaagagagttaggctgagttacaacgaaagtcacctcttttgcaccaattttactcactaatgctaaacgaacagcattctgatcaggcgtttcgatacctgcaacggattttagttccattcccggcgttaattttgcttgttctgcgatagaatcagggcgaatatctgcaattattggctttaatgccggcacccctatcataaaaacaagccaataagccacaatggctaataagaaatttgcaataggtccggcggcaacaatagcggctctttgcccgacggttttattgttaaaagcgagatgacgacgctctggtgcaacttcggcgacacgctcatccaacatttttacatagccacctaaaggtatccatgcaacgacaaattcggtgccatgtttatctgttttacgccaaatcgctttaccaaaaccaatagaaaaacgctcaacataaacgccacagcgtcttgctacccaaaaatgtccaaattcatgtaccgtaataagaatacctaaaacgataataaacgcggctagattccacaggatacccattgcttacctttacatttgaaagccagaagaaactaaaaacaccaatccagcgaaaacagggatcgccgcggtcaaactatcaatacgatctagcacaccaccatgcccagggataagctgactactgtcttttatgccagaaacacgtttaaacatactctcagccagatcgccgaatacggaaacaatcaccacgatgcccgaaatcagtaatagatggttaggcacttcagtaattggtgcgaaacgcgtaaatagccatgaaacaacaccagcagtgattaacccgcccaccagaccttccaaggttttacccggtgatactttcggtgccattttatgtttacccattaaacggccaaatgcataagcccctgagtccgcagcccaaaccaataacatgacatacagtaaccaccaggcccctgtatatgagtttgtgctatatcccaacatacgtagcgtcatcatgccacaataaaaaggaacaatcgtcaatataccgaacaataacttaagaagaacagaatttttccacatattggctgaattcggataactgacaactaataaaatcgccgctacccaccaaaagagcccagcccataagctattcttaatcattgctgtatcaagcaggtgatcaaaatccggtaacgaggcttgcataagaactaagagtgcagcaaatccaacacctgtagcaatacgtttaccttgagaatgccagccgataaattgagcccattcccaacccgctaagcctgaaatggcaataataactaatccaaatcctgcgggaggaagaagaaataaagcagcaataacaatagggattagtattaatgcagtaatgacacgatacttaagcaaattatcctcccagatttacagtatctgtttccgatgttgtaccaccgaaacgtctttcccgtttagcaaaagcatcaagtgcattctgaaaaacttgttcatcaaaatcaggccataaaacctgtgtaaaatataactcagcataagcaatttgccagataaggaaattacttatacgatgttctccacctgtacggatcacaagatctacaggcgattgatcgtgtaaacacaagtgtgaggatatcgtattttcattaatatcttcgacagctaactccccttttgcgagggaactcgctaattgttgtacactttgtgtaatatcccatcgcccaccgtaattggcagcaatatttaaattgagtccggtattatttgcagtcagtgcaacagagttttttattctatcttgtaaacggcggctaaaacggctgatatcaccgataattgttaatctgacattgtgtttgtgtaggcttttcacttcattatctaatgcaaaaacaaacaactccatcaaagaactcacctcttgttcagggcgattccagttttcgctgctaaatgcatataacgttagtgattcaattttatgtttgacggaaaagctaaccgcatctcgaactgctttaattcccgcgcgatggcccgtaactcggagtttcccttgtttttttgcccaacgtccgttgccatccataatgatggcaacatgctttggttttgatgcggatgaatcgtcactggataagttcactcaatttaaccctttgctaatctgatactgatacagacagtcctcttcggataacctacgcacaaaaaaaccgtgtgactccacggcctttggcaaagcctcaaagttgctaaagcggttgctttagtaatgaactgttaattttcattattgtctttagtgatttggcaactataccattagccagaaagacgaacaaacacactctggtaaatatcatcatcattatacaatttgtgcgataatctgctgtgtttgtaaccttgctaatttatcaatttctaaaacatcgtcgatactttgaggctcagagaggtcaaaatgttcaaccactttgcgattaattttagcaatatcagtgaattttactttttcgtttaaaaaagcatcaacaacaacctcattagcggcatttaataccgttgttgaagcttgtccccgttgcgaggcttcgatggcaagtgctaaacaaggatagcgctgatagtctggacggataaattctagggcttgtatctcaaaaaaatctaatgctttcgcgcccgattgggtgcgatgaggatatgccatggaataagcgataggcgttctcatatctggctcaccaatttgtgcgataatgctaccatcacgatagcgaaccattgaatggatcaccgattggggatgaataatgacttccatctctgcttccgaggcattaaagaaataacgagcttcgatatattccaagcctttattcatcatagtggctgaatcaaccgaaattttacgccccattgaccagtttggatgtgcgcaagcttggtctggagtcattgcatctagctcatctaaaggcgtatagcgaaacggtccaccggagcctgtgagtaaaatactggtgatgccatgggcttctaaagatgcatggcctaaattgtcttgaatacctgtaggtaaactttggtagatagcattatgttcactatcaataggtaaaaccttcgcaccatatttagccaccgcatcaaagaataaacgaccactcgtgatcagggattctttattggctaataaaattcttttccctttttctatcgcagccagtgtaggcttaagccccgccacccctgtaatagcagacatcacttgatcggcttcatccaatgcagcaatttcattaacagcatcagagcctgataatatttccgttttacacgatgtattggctaataattgtttcagctcaccggcacttttttcatctgacatcaccgcatatttaggctgaaaagcgcgacattgctgcgccattttagttgcattttttccagccactaaagcaagcacctgaaactcatcagggttattttcaatgacggataacgtacttgttccgatagaccctgttgagcctaatatagttatttgtttcattattaatcaatcagtatatcaataacattttcattaaaaggaattatatcagcatgacgagataaatgaggggaaagatgataactttaataaataatgtgataaaaagaagatattaggcatttattttccagtaaatgctcaaaaataatgccacatttcagtggcattatcagaaaaagaataaaaattagaattccattaactcagcttctttcagcgttaatgcttcatcaatttttttaatgaacatatcagttaatttctgaatttcatcttgtgaacggcgttcatcatcttcactaatttctttatctttcagtaatgctttgattttatcattagcatcacgacggatattacgaatagagacacgaccttgttctgcatctccacgcacaactttgattaagtctttacgacgttcttcagttaacggaggcagtggaacacggatgatcgcgcctgctgatgaaggatttaagcctaaatctgatgccataatcgctttttcaacagcaggtgctaaagtacgatcgaacaccgtaattgccaatgtgcgaccatcttctgccacaacgttagcaacttgatttaatggagttggtgcgccgtagtattctacaacaataccatctaataggtttggagacgcacggccagtacgaactttattaatttggctttttagtgcttcaacgcttttgtccatgcgttcttgagcatcttttttgatttcattaatcacgttataaacccttgggaactggttatcttccagacgatatcaaattatgatatcgacataaatgaattggcgtactttaagatgttaacgccaaattataccattgtctctgtgtattaagcgtgagaaatcaaagttccttcactttcacccattacaacccgacgtaatgcacccggtttattcatattgaatacgcggataggtaaattatgatctcgggctaatgtgaatgcagcaagatccatgactttcaattcacgttctaatacatcctgataagtcagcttttcatataataccgcatcaggatctttggttggatcggctgaaaatacaccgtcaacttttgtcgctttcaatacaacgtcagcttcaatttcaataccacgtaaacacgcagctgagtcagtcgtaaagaatgggttgcctgtacctgccgagaagataacaactcggccatggcgtaataagctaatagcctcagcccaactgtagttatcacaaacaccattaagtggaaatgctgacattaatcgtgcattgacataagcacgatgcaatgcatcacgcattgctaagccattcatcactgtggcgagcattcccatgtggtcacccacaacacggttcatacctgcagctgctagaccagcgccacggaacaagttaccaccgccaattacgacaccgacttgtatgcccaattcaacgagttctttaatttcctgagccatgcgatcaagtacgctcgcatcgataccaaaaccttctgcgccttgcagggcttcgccactcagctttaataagattcgctgatatacgggttttgcattggttgccatggtgttctgtcctaagcagattagttaattggaggttttagatagccttactcttttcaaagaaaagcaaactgtcagtggagattgtaacaaaacagaaccgccttaaggcggttctattaacgcaaagcgttattatttgctcattgccgcaacttctgctgcgaaatcagcttcaactttctcaataccttcaccaacttcgaaacgaacgaagttaatgatttcagcattgttttctttcagcagatcgccaacagttttgcttggatccataacgaaatgctgaccagtcagagagatctcaccggtgaatttgttcatacgaccagtaaccattttttctgcgatttcgcgtggtttacctgattgcattgcgatgtccatctggatttggtgctcatgctcaacaacatcagcaggcacatcttcagggcgaacatattctggtttgcttgcagcaacgtgcatagcaatgtgtttgatcagttcttcgttagcgcctttagctgcaactaaaacaccgatgcgagcaccgtgcaggtaagtacctaactcttcaccttctaagatagcaacgcggcgaatgttgatgttttcaccaatttttgcaactaatgcagtacgagcgtcttcgaatttcgctttcagtgcttcgatatcgtcagttttgtctgctaatactgcagccataacatctttaccaaatgcgatgaagccagcatctttagcaacgaagtctgtttcacagttcagttcaaccagcgcaccgaatttaccatcagcagcaacttctgcaaggatgataccttcagcagcaacgcgacctgcttttttagccgcttttgcttgacctgatttacgcatgttgtcgatagctaattcgatatcaccgttagcttcaaccagcgcttttttacattccatcatgcctgcgccagtacgttcacgcagttcttttaccaatgcagcggtaattccagacatttgtttcttcctcgacttttctatgggcgagccatagatgttctcatagcagatgtgtaaagggggcctattgaggccccctaaccaatatatagcaatacctggttaaataagggctcttacgagcatgccttattattcagcttcgactaagccttcttcagcctgaacagccagatcttgagaacgaccttcacgaacagctgttgctgcagcggtcagatataatttaaccgcacggattgcatcatcattaccagggataatgtagtcgataccatctggatcagagttagtatcaacgatagcaaatactgggatacccaggttgtttgcttctttgatagcaatgtgttcgtgctcagcatcgataacaaacagagcgtcaggtaaaccgcccatgtctttgataccacccaggctgttttctaacttaccaagttcacgagaacgcattaacgcttctttcttggtcagtttgtcaaaagtaccgtcctgagattgagattctaaatctttcagacgtttgattgactgacgaacagttttccagttagtcagcataccgcctaaccagcggtggtttacataaaactggtcacagctttctgctgcttctttaacagcttcaacggcagagcgcttagtaccaacaaacaggattttgcctttacgagaagcaattttgttcagttcaaccagagcttcattgaacattggaacagttttttccaagttaatgatatgaactttgttacgcgcaccaaagatgaatggtttcatttttggattccagtaacgagtttggtgaccgaagtgaacaccggcttgcagcatatcgcgcattgaaacagttgccattttagacctctataagtttaaatttggggttatttcctccacaaatcccatacgaccgactcatcagctgtaaagattaaacctttacataagagcaccccggcgtatgtgtcgatttgtgtgtgtcattaacacaattgaatgttttcagatttactgctatttcttaaacctcacgcggtgaagtcatagccaataacagaactccggcgcgctttataccataaataacctcaagaaaccactattagttacggtttcactgccaatatatcggttaacaacagcaaataaaaaagcgcaatatgtaaagacaacaaacaatataaggcgtaatgtgcctgattattggcgatatcaaacagattactcctatcctctttgattggcacacccactttctgctgatatcataaatggtaattagaattatttctcaccatcataattcatagacctgcaataccatgcaataatgattgtattgtggcttttaaatctattaatgaagaactcaaatggctattgtaatcaagactgaagaagatattcaaaaaatgcgcgtcgcgggtcgtcttgcggctgaagtccttgaagttgtcgcaccctatgtaaaacccggcgtaagtacagcggaattagatcgtatttgtcatcaacatattgttgatgttcagcaagctatccctgcttgcttaaactatcatggcttccctaaatcagtgtgtatttctgttaatgatgttatttgccatggtattcctagtgaagacaaaatcttaaaagacggcgatattgttaatattgatgttactgtcattaaagagggttttcatggcgatacgtcaaaaatgtttatcgtcggtaaaccgactattcaaggtgagcgtctgtgtcggatcacccaagaaagtctctaccttgcaataaaaatggtaaaaccaggtattcgcttacgtgaattaggtaaggccattcaaaaattcgttgaagggcatgatttttctgtggtacgcgaatattgtggacatggtattggcgaaggtttccacgaagagcctcaagttttacactatgatgctgatgacggtggtgttgtgttacaaaaaggcatggcatttactatcgagccgatggtcaatactggagattaccgtattcgtaccatgaaagatggttggacagtaaaaaccaaagatcgcggttggtctgctcaatatgagcatactttagtggttaccgacaatggttgtgaaatcatgacactgcgtaaagaagaagagccatttatttctgccgtattagtcaacgaataaatcgcactcttctaaaatgtaaaaacgacatattttttcgaggtatgtcgttttttttattttcaactttggtaagaaaatagaaatgctagtcaggttaccgttttaacattactcttaatataatcagcatatatgagtgagatgattaactatgataacctccaatacctttcaaacagcaccaccgtccccttcgttgctgactgaaaatacgctagatagtactttactaaaacactctattgaacaatttcagtcatggttagcagatgcttttcatcatgatgctgatgttgctttgttactacaagctcgtagtcactttatcgaccaactactcacacaattatggcgttatactgaattagcggatcaccctgatctctgtatcattgccgtgggggggtatggtcgccaagaattacaccctctttctgacattgacttgctatttttaagtcaacagcctcttcctccccaacttgccgaaaaagtgagtcaattaattaccttgctttgggatatccgcttagagataggtgtcagtgtgagaacgatggaagagtgccttttagaaggactgtctgatttaactattgccaccaatttactagaagcgcgtcttgtttgtggtaataacgcactctatcaacaattaattaaacatatttttagccaaggcttttggccatcgcctgatttctttgcagctaaaattgatgagcaagaacaacgtcaccaacgctttcatagcaccagttataatctagagcctgatattaaaagtagtcctgggggacttcgtgatattcacacccttatatgggtcgctcaccgtcattttggcgcaacatcaatatctgaaatggtcaactttggctttttaacccctgccgaaggacaagaattactcgagtgccaatataccttatggaagatccgttttgcgctacatttagtcctcaatcgttatgacaataggttactgtttgatcgccaattaagcgttgcccaacttttaaattatcaaggtgaaggcaaccaacctgtcgaaaaaatgatgaaggattactatcgcgttactcgccgtgtgagtgagctaaacgatatgctactgcaactctttgatgaagcaatcctcgcattacaacccaatgttaaacctcgccctcttgacaaagaatttcaattaagaggtacattaattgatgttatagacgatgaatgttttcttaatgatcctattgccattatgcggttatttttacgtatggcagagcatgcagagataaccggaatttattcgaccacactacgccatttgcgttatgcccgtcgtcatttagtacaacctttatgtgagtaccaactagctagacaagtatttatgcaaatcttacgtcaccctagggcggtttcgggggcatttgtcccaatgcataaacatagtgtattaagtgcttatttcccacaatggaacaatattgtcggtcaaatgcagtttgatctattccatgcttatacagttgatgagcatactatccgtgtattacaaaaacttgaaagtttcgctgatgatgcaaatcgaaaccgacatcctctttgtgtcgatatctacccgaaactacctcaaattgagttattaagacttgctgctctatttcacgatattgctaaagggcgacatggtgatcactctttattaggtgcacaggatgttattagctttgctcaacaacatggactaaatcaacgagaaatcgctttagttgaatggcttgtaagtcatcacttacttatgtctgtaacggcacaaagacgtgatattcaagatcccgatgttatcttccaatttgcctctgaagtcaaaaatgagagccgtttacgctatttactctgtctcactgttgctgatatttgtgcaacaaacagtagcttatggaatagttggaaacaaagcttactgcgtgaactatttctcgctacggccaatcaattacgccaagggatgcactctattccagatttacgggaacgtatccgtgatcaccgtcagcaagcactaactattttacaacagcaacaggtcgatgaagaaaaactgcaagcgatttgggctcgttgtcatgcggactattttttacgtcatactccagagcaaattgcttggcatgctcaggcacttattgagcacaatagtgctgagcctatggtattgattagccaacaaaccgagcatggtggtacagagatatttatttggtgtgctgaccggccttctctatttgcttctgttgcaggtgagttagatagacgtaatttaaatattcacaacgcacaaatttttactaatcgcgacaatatggcaatggatacctttatcgttttagagcctaatggtaaaccactggcgattgatcgctatcatgctatacgccaagcgcttattcgcgttgtatcagccccttataacgccaatgccaaaacccgtgctttaccggctaaattacgccattttgaggtacccactaaaattaactttatcgcctctaaccataataaacgtacttatatggagttatttgcacgtgatcgcccaggcttattagctattataggtaaggtttttgccgatctttctctttcgttacatggcgcaaggatcaccactattggcgagcgtgttgaggatttttttgtattaacagataacgaaaataatgcgttaaaccaaaaaatgaaggatgaagtcgtagaaaggttgacaaaagccctcgtttcaaaggataaaatatagaaacccacgacaatacatataggaaatactatagatgcaagcattacaatctattattgataacgcctttgaacaacgcgctgaaatcacaccagataatgttgaaccacaggtacgcgatgcgattaataacgttatcgctcaactagacagtggaaaattgcgagttgctgagaaaattaatggtcagtgggttactcatcaatggctaaaaaaagcggttctactctcttttcgtatcagtcacaatcaagtgatcgacggtagcgaaagccgttattttgataaagtgccaatgaaatttgcaaattacgatcaagctcgttttgaaaaagagggatttcgtgttgtgccacctgctgccgtcagacaaggggcctatattgctcgtaatacggttctaatgccttcttatgtcaatattggtgcttatgttgatgaaggaagtatggtggatacatgggcaaccgttggttcatgtgcgcaaattggtaaaaatgtccatttatccggtggcgttgggatcggtggcgtattagaacctttacaagctaacccaaccattattgaagataactgctttattggagcacgttctgaaattgttgaaggtgtgattgttgaagaaggctctgtcatttcaatgggtgtttatattggacaaagtaccaaaatttatgacagagaaactggcgagatccattacggccgtgttcctgctggttcagtggtggtttctggtaatctaccttcaaaagatggtcgttacagtttgtactgtgctgtgattgtaaaaaaagtcgatgctaaaacacgtggaaaagtgggtattaatgaattgttaagaactatcgactaatataataacagcggatagaatgaattctgttcgctgtatctcattcatctttctatctggtgccaatatatgtacgataatttaaaaaatttagggatccaacatcctgaagatattgatcgctataccctacgtcaagaagctaacaacgatattttaaaaatttattttcgcaaagataaaggtgaattctttgcaaaaagtgtaaaatttaaatatccacgccaacgtaaaacaatttctgatactcaatcaggacaaggttttaaagaagtcaatgaaatcaacactaacttacgttatgtgattgaagaattagatcaaatttgccagcaagatcaagtggaagtggatttgaaacataaaatcctcgatgatttacgtcaccttgagcacgttgttgccaataaaattgctgaaattgaagccgatttagaaaaattgactcgtcgttaattaattgtctcaattttataataaacaccgcttataactattcacaacttaatagtaagcggtgctctttaataagatagccatgatccatcaaattattgctcaagtaaccgattaatttaattcaataatgtagcccagttttccagccaatttatagcaaatacttctggctcggcaatatccatactgtctatttttaatatttcaccaatacgctttgcttgatgctcttgtaataacgcttcaaattgcatacctgcaccacaaaaattatcgtaactgctatcacctaacgcaattaggccataatgtaaattaggttgataaccaacattatctcgtagctcataaaataaaggtgctattgtatcgggtaaatcgccttggccggttgtagagcttatcaccagtactgttgaatatttttgccaatcggcaagtgtaccttcttcatagatattagcttgatgtttatgctcaagcaaaatgcgctgcgcttcttcagcaaccgccaatgcattgccataaacagtaccaacaaaaatgccgattttagccataatgtcccctatttcatttatctataatcatagtaaatcgcatactatattattgatatacaatttatgctctatatttcttctctctttctctctacaataaatgatctatctacaataaatgatttataaattttattccattctgtgcgctctttagagaatcgccaaaaaatatcatttctaggcattgattcatttattatttttgctactaatttgcaagtccagtcaggtacataattatttttaaaatctagagattcaagcaaaaggaataaatccctatccaatatttctaattttttaacagcattatcatttatctctttttttcttaggtatttgtttttaaataataatttatatagtttaaggaaaaaacctttattttcctttaatgatttattataagaagataattgagaaaacatatcttttatattattaaaaaaaacctttttaaaattaaaattaatctcgttaactgtagtaaaattagatttatctgcttccttataaaaaaaatataactgattagatttaaaaccatccatcttttttataatttcattaagttcttcaattgttatttttatgtcacttaactctatctcaatatcttttttagataaaaactgactatctttgttaaagacattacatttttttaccaaagtttcaatagacattttgaattggtcaatgaggtcggaattacaagtaccattatcagttttagaactaattaaattagatagattatctatatactctacagtttttaataacccttggctagaagtagctaacaactcattcattttctgtttatctttatcaagttgttccatcagggctgctttttttgattttttggttttttttgagaggtctgttttttctgttttttcaaaattatttttattatgagaatcatcttttgttatatcagtattctctggttccttaaaaattttattcgaaatagtaattatattttgatatttatttacattattatataatgtaaatttaggtttacgcataattttatttgcaatattttctatgtcatcagaaatctttttttcttttttagagataaaactattaattatagtatttttattactaaatattttattaaaaagtgtactagaatcatctttattctttaacaaagaggaaaataatacatttatatcattagcatcttttattcctgatacaattaccttattatcaagtatttttattttatcagttaatctttctttttcaataatatcttttaatttcttcagcctatctttttttttatttttttcaagtatgtatttttccagagcacatttcaactctaatgtaaatttaagaaataaaacttctttatctttattaacaatcataaagtctctattactattgcttataagtaaagataaatcttttattcctaaagaaatatcatcttttcccaaagagatgttttttttattccctatagagagcacaaaagttttatattcatcatcttttccaaataatttcattgtcatttaatctcttaaactctgtttatgttctaaaataattacataattaacacctatattatttcaataaaaaaacactcttagctgatgcataagagtgttttctaatttagtcaaaaataatttatttttcagttgtacctatagaccgaatatattcatccatttcagtttttaaattatcagacttagggccaaaaatggcttgaataccggatccaaccaccacaacaccagccgctcccagtcttttcagctcatcacgatcgaccttatcaatctcttttacaccaatacgcaagcgtgtaatacaagcatctaagctactgatattatctttaccaccgaaagcagcgactaaagattgtcccatcgcacttttatccgcttgtttcgcgtttttatcttctacttctcgccctggggttttcaggtttagtttcacgattaagaaacggaaaatagagtaataagttatcgcataaagtatgccaataattgggaatagatacagtttactgctattgccactcaatacgataaagtcgattaaaccatgagaaaaacttgtaccgtcacgcatacctaacaagatacaaataacaaatgctaaaccggcaagaatggcatgaataacataaagaataggtgctacgaacataaatgagaattcaattggctctgtgatccctgttaaaaaggcagtcaatgccgcagaaatcatgatcccgccaacttttacacggttttcaggacgtgctgtatgccaaatagcaatggccgccgcaggtagaccgaacattttaaataggaagccacctgataacatccccgcagttggatcacctgccatataacgtggaatatcaccgtggaacacttgtcctgcgctatttacatactcacccacttgcatttggaatggtacattccagatatgatgcagaccaaatggcactaacgcacgctcaacaacaccataaataccaaatgcaacggctggattttgatacgcagcccactcagaaaaacgttgaatagcagtaccaataggaggccaaataaaggataaaagaataccgacaaaaatcgcaatcagaccagaaataataggtacaaaacgtttacctgcaaagaagcctaaatattcaggaagtttaatacgataaaagcggttaaacattgatgcggcaataataccggcaatgatcccaccgagtacccccgtatcagttaaacgttgtatttcaacactatcaggagataatcctaagacccaaggtgccaccaccagcatggtttttgacataatgccataggcaacgacggacgcaagagctgagacaccatcattattggtaaaacctaacgccacaccaatagcaaaaatcagtggcatattagagaaaaccgatccccccgcttctgccatcacttgagaaacagagacagggatccatgatagtcccgcagacccaacccctagtaagataccggcaataggtagcacagataccggtaacattaaggattttccaattttttgtaaaacaacaaataggtttttaaacatcaagcagactcccgaatatgggttgtatgtgttataagttttttatttgtttaaagctaaggtaggtttattcaattaacttatctaataataagctctatttattttacatcataaaataaatctattattgaatatatgatagctgtcacgtttcagttcatatcttttatcaataaaagtaactttttatattacaaccagttattgagcaataaatattgcgcaaactatcaaaacttaagtaaataagtcttgatagtcacgacaggtaagcaatattcaaatatcagaaagtacaaaatggtgagctaaatcctcaccgaattgctctaattcgggctttagaccacgccagccaaactgattaatcagatgttgccatggcagatcccacttcgctgttaagttaagtggttgttgagtgatcggatgaattaagtttagctgacttgcgtgtaacatcaaacgatgtgattgaaaatgatttacgaccccacgattttgtcgtaaatcgccatgggctgtatccccaataatagggtgacgaatatgagacatatgacggcgcaattgatgcttacgccccgtttcaggacgtaattccaataagctaaaacgcgatgttggatagcgccctatcgccacttctttttccacttttgcaagtggcacacaatgcgtaatacagtgttgaattttaggaggttgagaggcaaatttgtcagcgattttgtcatgctcttcaacaagtggactatcaattatcattggctcttcaacatagccacgcacaactgcatgatacactttctccatttgatgttgttcaaaacagactgaaagtgttcttgcaacctcggaagagagcgccattaatagcactccggatgtgggtctatctaaacgatgaacaggaaaaacatgctgaccaatttgatctcttaatgtttgcatcacaaacacggtttcatgcctatcaagccaactgcggtgaacaagccagcccgccggtttattcaccgccacaagatattcatcttgataaataatatctagcatcattgaccttattgcttaaataacgcatcaagttcacgaaggtgattgagtaaatccacataatcacgcgtctcatcgtccttaaatgcttcttcataataaggtgcgatagcaaaagccgtcggcaatgccataccactgtcaataagagaagataaacgagggatcagaacccattgcaaccattcatgcgcctccattgtatcaatacaaaaaggctctgagcttgcaaaagcctcatcattaggcgcatccaattgccataaccctatgtttttcatctcttcttcaattaataacagtcttgctaaaatgtgttgttctgaggtcattgtttattccttacataaaaacagaataagcataacattggggctgaaagagtgaaaaacaaatagaaaataaaggggccgtagcccctttagacaagaagatatgattatctaatataatacctgcatcctagcagaaccgttttattgtcatctgtcatccatgatgatgaaagtctatatcttgtattaatggaaatatcctatttcctacatccttgattactttctttatcacggttaccaaataatcccttagttggcggaggtagaatgccaataattggttagtgaaacaacccacaaaacaaaggtaatcaataaagaaaaaccatcacgaaaaacaatgtatgattaatccattgaaattatttaacaaacaaaaaaatcattacgcaacatttgcatttagtaagctaaagacactctttttgtaagatatatctcacagaaaaaatagctaaatgattaccttacttatcaaaaacaggggttaattttgttaaaaatagtgataaattatctgcaagcacttcccttttcttttgaccaaaagtttctagtattacttcacctgaaagattacatacagaaataatatcgttttcagacgctgttgtaccgataaacaaagtcggggtgagcttcaatcgtttttgtgtcacaagatgtccgatcatgttctcttgtagacgaataaaatcctcttcactccaaatttgaagcagagtaaagttgagcgaatcaaaacggacttgcatatcaccagcatattgcgtagtaaaatagtcatgtaattcagagcgaataataatccccatcgctttttcaactttttctaatttatctcgacccgtaaaaggctgtggtaaccaataaaccacattatctccggtacgagaaatacaaggagaaggaacaccataaagctcatggctggcaggaggaaaccctgactcttgttgccataaatcaacataattttgcgtaagctgttttaattcagtggaaatatcattcatcgttatcatcgtctgtaggcataaaaaagagaaatatatcccttatgttacctgataataccggtaattttgagcgccaataataaagcgttcatatactcttgatatttcgctagtataatcacggctctttccattttttgatgacattaggatatcgattatgtctttatatcagggagataaggctctcgaagcactatcattaggcaaagaaacacaataccacacacactatgatgcgagtctattacaaggtgtacctcgtcgcttaaatcgagattcactctctttaactgctgacaatctaccttttcatggtggtgatatctggacaatgtatgagctatcttggctcaacagccaaggcttacctcaagtggctattggccatgtagaattagatgcaacgacagaaaatctcatcgaatcaaaaagctttaagctctatctcaatagctttaatcaaactcgttttgaaaattggcacattgttgaagaaacattactcaaagatttaactgcttgtgctaaaggcagggtgcatctaacgctttacccactttcccattttacctcacagcctattgtcgattttgtaggagagtgcattgataaccaacctattgaaattgataattaccaattcgatagccaatggttaaacggatcaacaacagatacactggttgaggagacgcttgttagtcatctgctaaaatcaaattgcctgatcacgcaccaacctgattggggatctgtgatgatccaatataaaggcaaaaaaatcgaccgtgaaaaactactacgctatcttgtatcctttagacagcataatgaatttcacgagcagtgtgttgagcgaatattccacgatattatgacattttgttcaccagacacattaactgtttatgcaagatacactcgccgtggaggattagatattaatccttggcgtagtaattgtgagtttgttccagaaactggtcgcttagccagacaataacgtgaataatgcctgtatgttaatatgatctatgttatacagagatcagttgcacttcagtttgttatttcgggagaaaaaggagtcctacgtgataactcatgtcagcccattaggttccatggatctgctttcacagctagaagttgatatgcttaaaagaacagccagcagtgatctttatcaactgtttcgtaactgttcacttgcagttctcaactctggtagccttactgatagtagtaaagaactgttatctaaataccaagattttgatattaacgtactgcgtcgcgaacgtggtgtaaaattagagctagttaatcccccagaagatgcctttgttgatggaaaaattattcgctctctacaagcaaacctatttgctgtactgcgcgatattttgtttgtgcatgggcaaataaccacggcaaaacgcgacctacatttaaaccttgaaaacagcacccatataacaaacaccattttctctatcttacgtaatgcaagagcgctgcatatcgatgaagatccaaatatgatcgtttgctggggcggacactccatcaatgaaacagagtatctttacggtagaaaagtcggtaatgaattagggttacgcgaactgaatatctgtactgggtgtggacctggggctatggaagctcccatgaaaggcgctgcagtggggcacgctcaacaacgttatagaaatagccgttttattggtgttacagagccatcaatcatcgccgcagagccaccaaatcctctggttaatgaacttatcattatgccagatattgaaaaacgtctggaagcttttgttcgtattgcccacggcattattattttcccagggggcgtaggaaccgcagaagagctactctatctacttggtattctgatgtcaccagaaaaccaagaacaagtactcccactgattttaacgggtcctaaagagagtgcagactatttccgagtactcgatgattttattgttaataccttaggtgaagatgcacgacgtcattatcaaatcatcgtcgatgatgcggctgaagtggctcgtattatgaagaaatacatgccattggtaaaagataaccgtcgtagcacaggggatgcttacagctttaattggtcaataaaaattaatgcggacttacaacatcctttcgagccaactcatgaaaatatggcatcacttaatttaagcacgcatcaatctcctgaaaaactggcggctgatttacgccgcgcattttccggtattgtcgcaggtaacgtaaaagaagtgggaatgaaggcgatagaagctcatggcccttataaaattcacggtgaaagcgatattatgcgccgtatggatattttattggcggggtttgtcgaacaacatcgtatgaagctacctggtggtagtgcctatcaaccttgttacgagatcatcagctaattaattatggtacatttgctgatcattgatgcattaaacctgatccgccgtattcatgcggcatcaggttcttcatgcctgacagtgtgtgaacatagcgtgaatcaattgcttaatcacacacggcctactcacgcggttgctgtttttgatgaagatgatagggaaaatagctggcgccatcagttattgccggaatataaagcaggccgctcgccgatgccggctgatctgcaccaacagcttccagaaattaaagcaatgctacttaacttaggtataaaaagctggcattcaggaggcgatgaagcggatgatgtggccgcaactttggcaacaaaagtcgctcaagccggacataatgtgaccattatttcaacagataaaggttattgccaattactttcccctgccatacgtattcgtgactatttccaaaaacgctggctcgatcttgaatttattaatcaagagtttggtgttaaaccgacacaattaactgattattggggattaacaggcgttagcagcagtaaagtttccggtgtccccggtattggccctaaaagtgcaacagaacttttgcaactttatcctaatttagagtcactgtaccaacacattgatgaagtgcccaaaaaatggcaaaccaaattgagtgataataaagaagttgcttttattagccgccaaatcaccacacttcgtactgatattcagttaaacggtaatttacaacagttacgtttaaaatagtttaatcaataaaaaggctaacgctctgtaatagagaattagcctgttaatgatttactcatcaaaagatgaacttaactctatgaagttaaaactcgcgatcaggacgataagcagcccagatattttggatatgtaccgtgatctcttctctgtcatgatacaaatgcttagcctgaattttagcattaatgcctttctcagctaattcagctctaattttatcaaggatatgcgcaacttcttcataacgctttttcatcggtaattttaagttgaagattgcttcacgacaccattcattaactatccacgttgtcattaatgcagccactttggcaggcttctcaaccatatcacacaccagccaagtaatattctttgacgtcggctcaaacttaaagccatcagcttgatggtggcgcacttgccctgtttccattaaagaaggagccataggaccattatcaacggcatgcaccatcatgctacgtttaactaattggtaagtccatcctccgggacacgccccaagatcaaccgcactcatcccactggctaagcgctcttcccactcttcataaggaataaaaacatggaacgcttcttcaagttttaaagttgaacgacttggtgcatcggctgggaattttaagcgagggatccccatatagaatggcgagttattaaagctataggaatagcccacgtaacaacatcccggagcaataaaaaagacatggatcaccggacggctataattttcaacttttaataagatcttttctttacgtaattgattacgcaaaggaacagtgaatttgcggcaaaattttaataactctttgctttcattggtatcagcgacttcaacacgtaactcacctgctttttctgtactaccttttagctggtcaataatgggagtaatacgatcttctggtggtaagttctttaataattcaccacaaacaaataattggcgtgcaaaaataagtcctctaaaatccacatcacgagcaattttatctgcatcaccttcttgatagcattcaaaaatgacgtaaccacttccctctttcactcgagaaaagccataaacacctatttgtcctgccttatccgttatctccgccgcgcactctttttcaaaaccagggcgacaatataatgctactttattcatggcgagatgccggtgtccttagacgcaaagcgccaataaaaattaaaatccaaccaataagaaaactaaatccaccaattggcgtaaaataagataataacctaacctgtgttagcgccatacaataaaggctaccactgaaaagtaaaatgcctaaaccaaagaaaatacctgcccaataaagccataaaatggttttgcgcattaatatcgccgctaaccctacaagtagtaaagtatgtacgatttgataacgcatagctaactgaatatattcccaatgctgtggcgataaatgaggggctaatttatgggtagcgaatgccccaaaagccacataaaaaaaaccactgattgcggaaaacataagcaatgtacgactattcactgtttattccttcctgttaggagctaatttacctaaacaaatattaagaagttgccagtaatcctaatttttcctgttcatttgccgcttgagataaaatccattgacggaaagcagcaatttttcctaattcagcctgactatcttggcaaactaaataaaaggcatttttactgacaagcacatcttgaaaaggcctaactaatcgacctgattcaatttcactgcgagccataacattattaactaatgcaacaccttgtccatgtactgcagcctgtatcaccatagagctatggctaaagataggcccttgttgcacattaatctggttttggatctccaattgacgaacataagcttgccaatcacgacgcgatgtatcatgtaacagtgtatgataaatcagatcggacggggtttttagtggtttttcacctgtcagcaaagaaggagcacaaaccggaattaaatattcagcgtaaagacgatctgtacgcaatccagtccagttcccgcggccataaaaaatagccacatccacatcatcagcaagcttatcttcttcgcgatcaaccgcctgaatacgaacatcaatccccggataagcctgattaaaccctgataacctcggtactaaccactgaatagcaaaactcggcgacaagctcactgttaaagccccttttgcgcttcgcgcaagtaattttcttgtcgcttcattaattgaagagaaaatttctttgatatcaagataataactttgaccttcttcggtcagtaacaaagaacgattgcgtcttctaaataattttagtccaagaaattcttctaatgttttaatttgatggctaaccgctgcttgagtcacgaataattcttcagccgctttagtaaaacttaaatgacgtgctgccgaatcaaaaactctaagggcatttagtggaggtaaacgtttagacatattctgttgtgaaacccctattttggctgttggtaaaccctaacgttagttattagttttttttatgcgaagcattataatttgtcccttgatgattagccagtaaatacctatagtactcgcacttcctaagccggaacgaaaagttgtgtagtagcaatactgcaaaacttttggctttgtggttgtgatgttgtgtttgcaagttgtctggaaattccagactttgtagctgatgctactgttttttttcacttcctgtacatttaccctgtctgtccatagtgattttataatgcaccgccaaggcggtgctttttttatatataattttactctaacttcgtaacgctgacggactgcacatcctatttttatgctaaatgcgcacctacttagctattattatgctaaaaaagtgtaacatcttttccccataggcaataacagcgctgagtagataaacatctattccattttcgatgctataaacaagctcacctttatcgtgttaccataaaaatctatcgcaattcacagtaaacaaattagcaatttcattataaataaatattattaaccgtataatctcgcggttagatttttacttactataacggcgttttctagactgactaacacaagctcattatgaaaccattttcccctactgtttttcgccaacaatttcctgctattgaggaaaatattgtttatcttgatagtgcggctaccgcattaaaacctgtagctatgattgaagcttcagatgaattttatcgccatagctcagcgacggttcaccgtagccaatatcaacaagctaaaaagatgacacaacactttgagcaagcacgtcagcaagtcgctcaattacttaacgtcgcagatagcgatactattatttggacgcaaggcaccacaggctcacttaatcttattgctcaaggctatttccgcccacgattacaagccggtgatgaaattattgttagcgaacaagagcatcacgccaatcttattccttggttaatgttagcagagcagactggggccaaaattattcgctggccgattgaagataactttttaccttcaatcgccacactgacgacattacttacggcaagaacaagagtagtggcaataagccaaatgtcgaatatcaccggtgcacaaatcgccttagataaagtttctcaatgtgtacatcaatatgatgactgtttactcgtggttgatggtgcacaaggcatagctcatcatgcaacggatatcagcgcccttgatatcgatttttatgctttctctgcccataaattatatggtcccaatggccttggcgtatgttatggaaagcgcgaacttttagaagtgatgtctgcgtggcaagggggcggaaaaatgttaaccacggcaagctttaacggttttgtacccgcggctattcctcatcgctttgaagcaggcacccctaacatagctgctgtaattgctttttcagcaacattagattggttacaaacgcaagatatggcgcaagccaatcaatacgccttaactctggcagataaagcacaggcgcgtcttgagcaactggagggttttatcagctaccgcgcgcctcattcaccggtactcgcttttaattttgagggtattcatcacagtgatttagcggcattaatcgcggaacaaggtattgctttacgcacagggcaacactgcgcacaacccttaatcgatgctttaaccatctctggctgtttacgcgcttcttttatgccatataatcaactttctgatattgataggttagttgatgcggttaaattcgcactgtccttattaaaagatgaagattaaatatgaataataatacacaacacccttttggtcatgacattaccttagatggattatttcaagacttccagaaatctaaatcatgggaagataaatatcgtcaattgatccaactttcaagaaaattacccgcattacctgatgaattaaaaacaacagaaaacgaaatcaaagggtgcgaaaatagagtatggctaggtgttgagttaaacaatgacggcaaataccatatttatggtgatagtgatgggcgaattgtaaaaggcttactggcggttattttaacaacagttgagaataagacggcacaagaaatagccaatatcgatatattagctatttttgaacaattaggattgactaatcaaattagccaatcacgcactgatggtgtcaatgccattattgcgcgattaacgtcgctgacacagacatctcaaccctaacaagtcaatgtgtatagcttgttgtatggtggatcaatacgcttaaatgctccaaagtgcaactaggtgactagtgcgattgagcaccatcaacaacgcgacaacttgaagtatgacgagtacgttgcgccttagctaacatcttctttaatacatgagaaacggcaataaaaccaaaggaagcggtaaccattgtcaccgcgccaaaacccgctgagcagtccatacgcttgacaccatcggcagtacttttggccgcacacaccgtaccatctccttgagggtagactaattgctcggttgaaaaaacacaatctatgcctaatttacctttgctatttttcacaacattaaaatcagattttaaacgctcacgtaatttagcggctaatggatcttgaatggttttcgctaaatcgacgacttggatttgagttggatcaatctgtccgcctgcgccaccagtggtgataacaggaattttatagcgacgacagtaagctaataatgcggcctttggtctaacactatcaatagcatcaatcacataatcaaatgagttttgcatcatttctgccacattatcaaccgtaacaaaatcatcaacacaagtaactttgcattcaggattaatttgcaaaattcgctgcttcatcacttcacatttaggctggccgacatgctcttttagcgcatgaatttgtcgattggtattggtgacacacacatcatccatatcaattaacgtaatagcgccgatcccactgcgagctaaggcttctgcagcccagctaccaacgccaccaatgccgacaacacaaatatgtgcctgagaaaaataatacagcgcttgttgtccataaagacggccaataccagaaaagcgttgcagataggagtctgataatgaattttgcataatgcgataacaacctagatagcagaaataatcatggctattgttaatcaatagccatggcgtttgctcattttaccgttaatatgacaatataaatagtcaatcgttttactgtatggggttcagtaaggtgggttgcgatttttttaatacccatacacgtccataatgattataaaaacccgccatttgtccggcttctttaccaataccatgataaatatcgaaatgatgtcctttaatggctccccccacatccaaagcaaccattaaacgcatttggtattgtccagtaaacttaccggtattatctaaaatagggatttccgctaataatacggttcctgcggggataatacttctatcagaagccactgacgctttagcaatcagcggaatagcacttgcccctcttactggcgtaaaaggttcaggtttaaagaaaacgaaagaggggttctgttctaataattttctgacttcttgttcactatgcttatcagcccactctctaattgccaacattgacatcgcttctttttcaacttcaccattatcaatcagcactttaccaatactgcggtagggatgaccatttttcccagcataaccaaagaaggttaaaggtttaccatcaccataatcgacatagccactgccttgcacttccatcataaagttatccatgatggagttactataagcggcaattaaagtgggacttaaagcaccgttatagatagccgctcgtgaaggcaatttaccacgcactttggctggcatgcggtagagcggatatttaaagtcaccttgtggcgttaaacgtgcttctaaaacaggggtataatatccggtaaattttacattcccataattatcttccccttccatttgaaaggctgcgatattaaattgacgtaattgacgcgtatctgcccctgagcgtaaccaattttccactgcttgataagtatcttgattactattgtatagacgtgaagatgtttgatttatttggttaatttgttcaaggtaatctgaaccattaatgggcttgccttgcgtatttggcgagttaacttcaataagatcttgcttaagcttaccatctttatactgttgtccctgatctgttggacgatggcagcctgttaaggcaagcgctaatatccccaaaagaaacgattttcgccaagtaaccattttttacttatattcctactttaaaaagagttgatgacaagaaagataccaaagccaaatcaagaaagatatcgatacagaagtggttgcagtttttttaattatcggcttcaccatttagtgtgttatctaaagtataactgtctaaaattacacctctgtgtattatttctgaccgtttttaaaagaaaatggcaaaaattacataaaaaacttgcaagttatcagatcctgagtatagtgcccctctgtggagacgcggggtggagcagcttggtagctcgtcgggctcataacccgaaggtcgttggttcaaatccggcccccgcaaccaattcacaacatatgcagtaagttaaaatttatagattcagtcgcgggatggagcagtctggtagctcgtcgggctcataacccgaaggtcgttggttcaaatccggctcccgcaaccaatttctataaatgttttcggacgcggggtggagcagcatggtagctcgtcgggctcataacccgaaggtcgttggttcaaatccggcccccgcaaccaatcctttcctaattttattttctacaaattcccattaaatactctcttaatccctactctatttacaataaccaatatactccctgttactgagttatgatttaacttattgggtaaaaaataataagttgttacctctagtagaaaataactatttatttcccactagaagtctcaaaaataagttgtagttgtatagcgagatcagcctcgatcagctaatgtcagttcaccaccattagcaaaataggctttaatacctttgaaaatagattcagcaacttgttgctggaatttagccgttttgagctttcgctcttcttcaatattactaataaaagccgtctctactaaaatagaagggatctcaggggcttttaaaaccgcaaatccggcttgatcgaccttatttttatgtagcttattcacgccacctaataattttaatacctcactaccaaattttaggctgtcattaattgtcgcggtctgtactaaatcaagcattgcgtgatcaacatagcgatcaccacttcgactcaccccaccaattaaatccgcttcattttgggtttgagctaggtaacgtgcggtattacttgttgcgcctgttttggatagcgcgaaaacagaagagcctctagccgagcgattggtaaatgcatctgcatgaatagagacaaagagatcagcctgcattttacgcgctttcgctactcgcacttttaaggggataaacacatcctcattacgcgtcatataagctttcattttggcatctttatcaatcaaagctcttaagcgacgggcaatttgtagtacaacatctttctcacgagttttatatttccccatcgctcccggatcttcaccaccatggccggggtcaatcatgataataatcggcctatctcgtcctgctcttccgggcttacgcgtatccgtttgttcaggcactgcttgttgtaaatccccttcgttatattcacgcaatagcgctaatagcggatcatcttcactcgtcgccgcatggcttggatagaaatcgagcactaagcgatttttaaattcagcaacgggttttaaagtaaacatttgtggctgaacgggggttttaatttcaaacactaaacgaaccgtagttggggtattttgaccgacacgaataagttttaagtaaggatcgtttgtttgcacttgactagccatacctttcagaacgctattcagttggataccttcaagatcaaccacaattctatctggtgctgataacgcaaactggcgatatttcaagggtctacttgattcgatagtcacacgtgtataagtcgatgcaggccataccctgacggcaaccactgatgatgttgccgctaagccaacaggactaacacttaataacaataacgcgccaattcctttaataagacgacgacgtgtttgattatgttctgaatgactcatgaaaatattccaaaaaaaacgattaacatcaaaaagtgctaaaacagacggtcaaaaaatatctgaacgaaaaactttaccgaatccacacttcactgtcacttaaaaacagcacaattacacacttttatacaaatattctgccttctgttaaaacagtaagatcggattttacttgccatttccgctcaaaaagaataaaaatacattaaatgcgaataaaaattcacctgagaggggctttatgaaagagcgtagcaccgaattggtcgatggttttcgacactcggttccgtatattaatgcacatagaggtaaaacatttgtcattatgctagggggagaagcaatagcccatgagaactttccctctatcattaacgatattggtttattgcatagtttaggaatacggttagtggtggtttatggcgctagaccacaaatcgatgtggctcttgaagagcaaaaaatttctccgctctatcataaacacacacgaattactgatagtaaaacccttgaagtagttaaacaatctgccggtactttacaactcgatattactgctcgtttatcaatgagtttaagtaatacgcccttacaaggagcgcatattaatgtggttagcggtaattttgtcattgcccaacctttaggtgtcgatgatggggttgattattgccatagcggtaaaattcgccgtattgatgaagaagccattcatcgtcagttagataaccatgccattgtgttaattggccctgttgccgtctctgttacaggggaaagttttaatttaacctctgaagaggtcgcaacccagctagctatcaaacttaaagcacaaaagcttattggcttttgctcttcgcaaggggttgtagatgcaagtggccagattgtgtctgaactcttacctaatcaagcagaagaacgaattcaagcattacaaactacaggcgattatcactcaggtactgtacgttttttacgaggtgcggtaacagcctgccgtcgtggtgttgagcgtagccatttattaagctatcaagcggatggtgccattgttcaagagttattttctcgtgacggtattggtacgcagattgtgatggaaagtgccgagaaagtccgtcgcgccaatattaatgatattggtggcatattagagcttattcgtccattagagcaacaaggcattttagtgcgtcgctcaagagagcaacttgagatggaaattgatcaattcactattattgagcgcgataatctcaccattgcttgtgctgccctctatccttatcagtctgaaaaaataggtgaaatggcctgtgtcgccgttcatcctgattatcgtagctcttgtcgaggtgaagtgttgttacaacgcatatcaacccaagctaaacagatggggttagataaattatttgtgctcacgactcgtagtattcattggttccaagaaaaaggctttacgcctgctgaaatcgataaattacctattgaaaaacaggctctgtataattatcagcgtcgctctaagatcttaattttagatctacataaagagtagttttattaataaagtaaaaaagacaggctccccctctcaaagcctgtcttttgctatttactataataatattaattcgtattaacttaaaaaatcactcagtaacgcagtttttcaactaatccactgcggcgttgaatacgtgtctggatcgccattttcaccatatattcagaagaataaagtgatagcttctgcttggctcgcgttatcgccgtatagagtaattctcggctaacaataggagaaaattgtgttggcaacaccagtgccgtatgggtaaattccgaaccttgtgatttatgtactgtcatcacataagcagtctcatgttgcggtaaacgactaggttggatagctttcaatgtgccatcaggcaactgaaagaaagctttcatttctccttcatcgttattaagcataatgccgatatcaccattaaatagccccaatgtgctgtcattacgctggatcataattggtcgtccaatatactcccgctgataactatttataggtcgtcgtatcaagcgttggcgatgtaacagcatctcaatacgttcatttagtcctgtgacaccaaaaggcccttctcgcaaagcgcacaataaacgatattgattaaagctatgaagaatagtctctggtgctgctttttgcgcgactaacgatagatagtgatgataagccttagcaacatcttgaagcatcttcatatagctctcatcggtgtctaatgagataaattcgatgtcctgcggatcggtatgtttttctcgctcagtgctctcttgtgttactgtcgcttttttcagtaacgtcatagcactcttcacttgtccttgattaaccgcaaaagctaattgaccaatacctgaatgtgagccaaaacgataacttttacgcagtaaacatagtgaatcactgaccaccgaaactggcgtagtagaagtcgtcatagaagcgggatctttctgtaattcaccttgtgttaagcgatcaatctgctcaaaacggcgttggctaaacccctgatccgcaaaacgacaaatatcccctaaaacggctcctgcctctaccgaagcgagctgatctttatctcccagaaaaataacatggcaatgttccggtaaggcctcaattaaacgcgccatcatcggtaaatccaccatagaagcttcatctataaccaagatatcaagttgtagcggattatcgcgatgataacgaacttgctgactttccggttgggcacctaataagcgatgaatggtttgcgcttgatcgggcatccattttaactcttcttcacttagtgccaattgcgctaatgctttacctaatgattcggtcaatctagctgccgcttttcccgtgggtgcggctagttgaataatgggtttttcattcgccgttagcatgacaaaagcagctaaaatctttgctactgtcgtggttttccctgttcctgggccacccgaaataatcgaaatagagcttgtaatagcaaccgctgcggcgactttttgccagttagtttcagcatgtgttttaacgcttgggaaaagttgatttaatacgtttgttaattgattttcatcgatatcaaccacccgttgctcttggcgaaaaaattgcgcaatttgctcttcataacgccacattctttgtagataaagtaatccgttatcgagaataataggtgaaggtaagtcactatggccttgattaacacactcgctctgattaagctctgccagtatttctttcgctgatggttgcgccatttcctgccaaatggcttgtgaaagctcggtgtgtcgcccatcaaacaatttatcttgttgtatgatatttaacggtaagcaaacatggcccgcccctgtttgagcactgagataggcaaaaataaacagtaggataggattttcatctgccaccagcatttgagcaaaacgtaaatctaacgggcgcaataggttttgtgcaattgcttgttctaataatttaatcatttgaattgttctcacccagcacgttcactttactgccgttaacctcaagcgcttcccctttaaatagcgcatctaatgcttctacaaacttttcttcaggtagataggtatagacgccattgcccgggtagtcagtatcaatgccacgtaagaagagatagcagatcccaccaaaatgacgttggtaatcataatcaggtaagcgttgttgtaaaaatcgatgtagcgctaaagtatagagttgatactgtaaatcataacgatgatcgcgcattgcattgctcatcgcctcttgcgtgtaatcctcactcgattcaccaagccagttagatttatagtcaaccacataatacttgccctcccaacaaaatactaagtcaataaaaccttttagcatgccttgcacttgctgaaaattgagggctggacattgcgcagataaaggatcgtattgacgggttaattctgttaactgtgccgccgacatctccttttcaataggcagatagaattgtagctcatcgagttgatgctccttaggaatatcagctaaacataagccttgcgcatttaatggggtgtgaaaaagggtttccatccaagccaccaacaatggcgtccatttttcctcaaaaccttgggcaataagttgctcttgcatccaactttcatcaataggctgtgaaaaatcaagctcttcaagcaaactatgtaaaaatgtccccgcgactgcaccacgagggaagtgatgaatagagagttcatcgctgtgttgcgctgttttctcacctttagcatcggtatctaagcccggtgcgatagattgtaccaaggcatccaaatcagcactatcaaatagatatccacgagcagagtgttgtgccgttaatcccgaataactggtgatacgccaattatcattaatttttcgcttaaatatggcggcatctaaagcaatatccgttgtatgtggagattgatatcgatgcgttgaggtatcacctaacgtgatcacttttatattgtcatcaagcaattgattaatggattgatgtaatagctcactattaccctcttccccatgctgcaacagatatcccagcgcatttttatgcaaatcagttaatcctgacttacgtttatttcctttaaccaaaggcgcaacaccaacataacaacaaaatttcgcccgagttaatgccacatacaacaagcgtaaatcctctgccagtcgctcttcatcagcaagacgcacgctatcaggttgattaaaaatatctaattttgcgtaaaattcatctctatcatgataaagcgcgcccttttgttcttgataattacaggcaaaaggtaggcaaacaatgggatattccaatcctttagatttgtgaatggtacaaatttgcaccagatttttatcactttccaaacgcatttgctgactttccgcttgtgcatctggtcgagaaatttgctgggctaaccaacgaataagggcgtgctcgctatcaagctgtaatgatgtttcttgtagcaactcgccaatatgcatgatatcggttaaacgtcgttctcctgcttggcttgcgagtaagttctcagcgatttggttttctatcatgactttacgtagcataggtaacacaccacgtttttgccacaagacaaaataatcagagaattgctccacatagcggttccaacgctgttcatcttgattaagttcgtcaatttgttgtgcgttaaatccaaacagtgcactggcaagagacgctcttaacacccgttctttttcaggggttaccactgcttgtagtaaccaaagtagatctttggcttcattggtttcaaacacactttctctattggataaaaatactgattggatagataacagatctaatgcatctctgatcaataatgcttctcggcgactacgcactagcaccacaatatcggcagatgtgacagctcttttattatcttgttcgattaaccaagcttgttgattgtcaccagctgataaccagtcacgaatttgcatcgcacattgcgaggccattaattgttcataattaccagttgaaaggctttcaccttcagctaaccaaaaatttaatggggcaaccgttttttgctggtaaataaacttcatatgctgatttttttcagccgaattgacctcaataaaaggaatatgatcaaacaaaaaaggggttttagaacgtaaaaacagtttattaactgcacttaccatacccggagccgagcgccagttagtattcaatgtatagtggtgatcggtttgttgccgtgcccgaatataggtaaagatatctgcaccacgaaatgcgtaaatggcttgtttgggatcaccaataaatagcaaaccactctctgtatgctcaccatagatagtatcaaaaatacgatactgctgaggatcggtatcctgaaattcgtcaatcatcgcaacaggataacgttggcgaatagcatctgctaatgcttcgccaccttctcgttgcaatgccttatcgagacgcgttaacagatcatcaaatcccaactcaccacgacgcattttttcattttctatcccttggcgtatttcaggaatggcattagcaatgatcacatcacgtaacgttaaactttgttggcaaagtagttcgatttccgcaaataaagcgtgctcaggcgcagcaccctttgtagttttttcatgtagggttgcttgcgaaaaacgacttaaacagtcaggtaactgataacttttagtttcgagtggagtggcccatgcggtgatttcatcgatccatttaggtaagaaacgactactgtaactgcgtttatcaacaccagatgaagttatccaatctgcaatttcattgcaatgatgacgccatagtgttttaactttatcaatagcctcaatgactgcttgatgacgctgttcaacagtctcttttttagcgtcgaaatcaataccttgaatttcggggcattcaccttgtaaatagggttgaatttcatacagcagttgctcagggccagaccaaatttcgcttaccgcataggcaacatcataagaaaggggataacagtgcctgcgccaaaaatcagcgcaaacacgtttttttaactcatactcatcttggatcaacacctgttcaaacaatacaccagattcaaaggcgttagtggctaacatgcgctgacaaaaaccatgaatagtataaatggcggcttcatccatttgacgctcagcttctaatagccattgcgccgccaccattttattcgggatttgatctaataatatttggtaagcgttattgtcattttctacttgatgacggatacaggctagccttaactgatgaatattttgacgaatacgggcgcgtaattcatccgttgccgcttcggtaaaagtaacgactaagatctcttcaacacttaaggggcgatgaaatgctgactcgccccctaatccaagcagtaatcgtaaatacaataaccctatagtgtacgttttccctgttcccgcagacgcctcaatgaggcgtctttgatacaaaggaagtgtatagggatctaatacctgtgcctgtatcacttcactcactctttaatttcctcaacaggtaatgttttttgtaattcactcacggttgaatagattttccactgtttattttgcgcataatcagcgttgttaccctctttcccgattatttgtgaaacaaacacgagtcctgtcggtttaattatcgctttttcataaaattcgattgcttgttttagcgttaccttattcagttgggctaaaaacttctcacgaccatcatattttaagttattacgatagaaatcattacgataaagagaaacctcttcataaaatgtttgcggtggttgttttacttcatcaataatggcttttttatattgattaaattcagcttcacttagctttttcaagcgatcataagcttgttgataaaatgcatgatagcgctcattgagataaacaggtggtttagcattactttgcagtaaaaagcctaaaccggactgctcacccattgaagcttggaaagcaaagaccgcataacctaattgctcttctgttctgagttgttcaaagaaccaaggatgcacgatagaggataatactgatgtaattgcttttccttgtagacgctcatagccaacagggataaacaattcacctagcgcattatcggtgcttttagatttattttggaatgtaacttgatttaatttatcaaaaactaatgtgtcgccaatccaatattctgttcctttattacctaataatgcctgtgccgatttaactatctcacggctctgctctggcgttaaattaccgataattaatgcttgaagcgctgcattttcaatgacatcacgacgattatctttaatatcttgtaacgttatcgactctaacgccttaagtttatcggcttcttcataataagggatcgtatttaagcgacgggcaggtaacattgcagcatcatacgctttaaggttatgcgtcacttccagttgttcacgataccaagatttagcttgatcaagctcttgctgagtagcttcaaacgttatatagctttttagtgtggcattcactagctctggtaaatgttgagtataaccattgactgagaaatcgactccacgcccagaagaagaggagatattcatgccggcaacagaagcttgataagccagttcactagaggttagatcagcaaggtaattggtcaatgtttgtataacttgctgtttaactgtgcgatctgcatttttattcactaaacttaacgtcacactggctttcggctcatcagaaaaatagtgcgatggcatatagaataaccgagcatgactgtcttgccataatagttgaggcttagtgatgttactatcagcatcaataagtgacagattatcaggaatataagggtttagtgtcggtaatgacaatgagatgtcgctggctaattcctgccatgaagctaattgcttcgcagtaattttatccacttgataaggtgcatgaacaaaataagcttgcttatttgaaggctcattagggctaatcacccaaatacgcgcattttctggtgtaagcgatcctagacgagaaaggatcgcagaaggttgatagtcatcggcaataaaatctgcattaagaatatttttaatcggataacgcagcatcatatcggagatatcttcaatatagttcatatctctaacaatagagccatagcggaatgagaggtcaagcacattggctatttctttaaaatagcgctcactgacccctttattttggatcagttgaatataagaaaatatcgctgaaataactttatctttctcagcaaggcctttgtctgttaaagaaacataaatggtaaatgaaccttgattgcgatcgatataggattcagatgaagcactaatattctctgctaatccttgctcttgtaaccaagttgctagtgttcccgtgctacgattgctaataaggtagccaatatattcatctgatttactgcgaaaatcggcaagattattatcaataccaaattcgatttgtaaggttttttgtggctgagctgggactaagtggatcattatccctttttctttttctgtcatcgcaggcaccgtcgttactggtgcttgggtgtttttattaggaatacgggaaaaagtatcagccgctaatttagcgagttcgtccagtgatttattactataaatcaccccattcattaagttaccagaatagtatgtttgatagaatttcactaattcatcttgtaatttactctctggcttatcacttaatgtttctaagtttcctcccataaaacgagagcttggatgagccggattcaaggtttcagctctcacttgccaaaaacgcattccatcgcgggagcgagccatggttaattccgcattaaccgcattacgttcacgatcagcatatttaggatcaagtaatggctccgctaatgcatctgccaagcgatcaactgcttcattaatggcactattttcaacttctaaataaaatgcggtgcggtaagtggttgtgctggcgttatgagagccaccatttttatttaaaaactctgtcagatcccctgattttgggtatttggtcgagcccattaacaccatatgttctaaatagtgggcaagaccttgttggctatctggatcttctaatgcaccgacaggcagagcaacggcggttaatgatttgaccgcttttttatctgaaaccagtaatacggtcatatcattagctaatttaatagcctgataatcacgtggatcactttcacttttttcaatgctatccggcaatacttgccaaagtggatctgttgcgaagctgttgatactgactagcatcaatagcaacataatccaaagttgcgataagtattttctcatctgatatgagctcccttatttttttataaatggaatgattggcttaaatatggctaacgtggtctgttttactgcctcaagaaaaggtgcatcaagctgatgaaatacacgttgaatatagatatcattcatttcaccttctcggttatagctatcggttaaatattgcgttaataccaattctgccttgttttgtatctcttcatcatcaaataaaaacgtctgtgtttttttatcgaagcaagcttgtaaccaagcccaaccactgttggcgaataaggctaaaggtgtattcatacctgtttgataatcttggatcaatctttcaagggttgaatacgctatatccgcagacaccggtgatagacaccattgcgactcttttctaccataaaaacggctttcgccagttccaccacttaagcagtacacgagatgttctatccataattgcagtagatcattagctgttaatgtggcgggtcgccaacggagtaacccatcggcttgtacttcatttaaacgaccaattaatgggatcgtattaaattggtattctattgtgacagaatgggttgctaaacgttcacttctgactttttcggctaaaggttgcaacgtttctatttgttgctcccaataaatttgaccaaacgcactagctggtaattttccagcagctttaatgcgttcataaagtgcttctgttgatgtcccttcgattaaggcttttaataaccattggtttaatagataacgttgtaatgcattaatgacaaaaggctcttcttccggtagctcggtctcttcaataacaaaattcgtttttagactttgctggaaaaaagcacgtacgggatggcgataaaagcgtgatagttcatctaaagagactttctcaatttttttatttaatggcgttgaaaatgcttggtgagcagttcctttcccacttgctgccggtaaccattcagcggcataagagcgatatagggcatccgttttaaagttttctggcgcaaaaggcactcgactatgttgggttaataagtggctgatgatacgctgcgcactgtcatcaacatttaatgatgcatcttcccttaaacggaaattttgcccaatataatcttgtaactctttaatcaataccgaaggattacattcacgatcgtcacgaatagatttaccaatataactgatataaaggtatttttctgctgagcttaatgcttctaaaaacaggtagcgatcatcatcacgacgttttctatcacctcgacgacgtttttctgccattaaatcaaatcctaatggctgaatattacgtgggtagatcccatcattcattcccaataaacagactgctttaaatggaattgaacgcattggcattaaggtgcaaaaattaaggcttccggctaaaaagcgttggctaattttctcatcatcaaaacgcactgtaagttcatcgcggatcagcactaatggaatttcatgttgatagtgcgcctctagaccattttttatcaccttttgccactgttgtgtgataagcgccaataccagctctgtctcttcatcagtgtcaaaaaaagcatcaacaagctgttgaccgatatcaagccactcttctaagttgcgagtttcgcttaatcgtgtgcgccattcacttaaggtatatagaaaatctgctagatgccctgctaactcagcgactaggccacttgattcatcgtaaggcaataccccttgccacggccctgcctcactgtccatcgcataaccaagaagcatccttaataacccaaactcccacgtattttttcctgtcacaggtaataaaaaggaggccacattttcatcatctaatccccaacgtatacctgactcttcaacccagcgccgtagtagcttcaactcattttcaaaaatggcaaaatgtgcagctaaggcgggtacttcaagtaatgcaagcacttgctctgcggtaaaacggctttgaggtaattctaataaagtgataaaagcttgtaagacaggatgtacttggcgagcttttcggtctgaaatggcaaaaggaatataacgctctgcgggcgcattaccaaatacggcttgaatatagggcgtatagctatcaatatccgccaccataacaataatatctcgcggtaataaatcagcatcttgctcgaggagatgcagtaattggtcttgtaatacctcgacttcccgttgtgggctatggctagcatgaaaggtcaaagagcgatcatcattggcgatgatccgttttttttcactactttggtaatcctcaagcgtctgacctatttgtgaaaaatcctctaaatcgagtatatcggcctgaagttgatgtaataaattatctcttggtatatcaacaaaagcatctaacacatcgctatattcaagctcagaaagaaaatagagattatctttacctaactttccccaagacgctaatagtggattgccgacattttgctccccttcttcattaaatagtgtcgatgcattttgttcatctttaaaccaaggtagttcatgaagttgctgataatgtcgaggctttctactatttagacgagcgaggaattttggatcttgaatatctccccagtaatagcggcaaggattagtaaacaataaatagatttcggtatgtctgccgattgcttgcagtgcttgcaaatagacttgtggcaatgctgaaataccacaaataaaaatacgcgatggaaaacagtgcgcaagcgcccctactggcgcatcattcaaagtagaaataaattgttgataaagattagcacgatgccatttaggttgcgcaagatcttctgtatagcgttgcagtgccaaccacagtgttttttgccaatattgattgtcactcaagccatcaattagttgatcattttcccatgccgacaaccaatcaggacgataaaccagatattggtcaaagagatccgccacacgccccgctagttgatgtaatttacgtttgtcttcatcatctttaagataatgtcgcaagggtttaaatgccggatcatcaaggtaattaggcaataatgccattagtttccatgtcatggcatctttagaaaacgcactttctttaggtatacctgataatacccgagtaaacatttcccaaataaaagtagcgggtaatggataacggatattagcagcaatacccaaactttctgctaattggatttgtaaccactgcgacattccgggactttgcactaaaatcacttcttgctcaaaaggcgatgatagtggccgattttgcataaaatgtaccatcagtgatttaagtagtgataattgatttgaatggtaaatatggaacatcagatcctcattttattaatcacatgaccaatggtataagcgtgtcacataacctgaatggtgggttatcgatccctctattttttgacagccttccgcttcaataagtgattgtgtcattattttaaggttatcaacagagttgaatgacatttgcccataaaaagcaaaaagagacgctccggcttgttggatagccactaagcgctgaaaatcaacttttaaggcttggctataccctataatagcgacaaagctaatattaaagaatagcaatactgacaccatattaattagcatactatcttcttttctttcatgattaattaagtatttattatcaaatacagccttctttaactagtggacagtagtctagccaaccattatgttgggcttcaatatgcagtttttccttaccaaccagattaatccattgataatgagatatcttatctccgctatgacttttagcctctccgagtagtaaagcgcttgtctttcctctcaaagagaaacagcttttcatattagactcagcagtaaaagtacgacattgccattggtaaagacgagaaggcgataaatcccatgttaaggtcattccccatgacaacgcagatccagcgaataaaaaggtctgctttgcttgtaactcttgcatcaccattaattgacattgacgataatgataagcaaaacttgtcagtaacgataaacttatcaccataaaacctactgcagccatcagaccgatgacaccctgttgctcctttattgttccctgtgtcgttatcacgaaatattccttaatagtattgatgtttgatagtgtacttttaggttaatattttgttttgcttggaattttaatgataatgatagatagttaaatgcacgtttttttattggagaatagtgtgtatagggagttaagataaattctgtcacctcaatttcttctttttcgaagatctgttgccaacctgttgaatcacaattttgcacaccacgacgttgttcaagctgaccgttttttaatctaaaaccaaagtaatcactctcttgttcttctggactctcccaatggccgttattgttcatatcgtaaacaaacaaaacacaagagccatgagggtgataaggataatgacctattttaagtggtacaggtaaagaagcctttttaacagtgcaatcaccattgcagtaccctgctcgccttaattgcgtctccagtaactgcaaacgctgttttagataaatctctaaacgatattgttgataagaagaagttaactcattgataatataaggataagcacgtccaatacaaactaataaaatactacttatcgtcatcacaaagaggcactccatcaacataaaacccgcaaaatcatgatgttgaatagacaaaggacgctttagcatactgaaaatgcctttattgtctgactgcacgctcgaatacgccctaatgaagagataataattttgacctcttcatcaccatttgacagcacaaaatgcatcggtcgtaatgtttggcgtaagccacaaaatgtaaagcgtgttgctgtagagcgaataagctgattgtttaaccctaattgaatactttctttggttgtgggtgttgttaacgattttgcctctaatttattaataggtgatagccacaatacaatttgcactttgcaattaaagagcagtgagcgttgttgttgataagctaaaaacgccatcacttctcttacactttgaactaactggcgttggcgtaacaactgatgatatgagctcaaggataaagcgctcaatattgctactatagccataacaataagcacctcgaataagctactccctaaatgtttagagtgggaataatgattgcctgtcatccatgcctcctacttgttttccttgtcattgttactgttttatctcaataacaatgcaggcaaaaaccagataggtaaataaaagctcatcaaatttaagagaggttacgcaatacgatatttttttaagttaataacaataaaatgacgattttttgatatcaaaaacccccaataattaaattcaactattgggggtcacttcaaaggttcgggcttagctggagtgctacatttcaaatttttttactggcttcggatctttacttccataaatatctgtttggatagtgactagcagttcatgaagagtaatttgtaaaaattcaagaaaatctgggtgaaggagagttctatctacgacagacacaggtaagaatcgcttcatctctcccttaaacttttcactcgcaaccaatgcaggcaaagactcaattcttgcttgcaaccattcctcaaaatgctcattgagcttataatcggcaacctttttcattaccagttcagcgtctggtttaacccctttctggtgcaaccacaccaaatcccacatatctctataccgaatacgtgaggttgttgctgggaatgaaaccaatttatcagccatgacctccgtgagctcttccactctaataatcaggtcagaatagccactaggaagctgctcatagtttttaacaagcgttcgaagggtgttggtgtatgcaggaatgttggctatttccactttgatcttctgctttggtaggtctttttttcctggattggtagtcactgatatttgccacttatcgacttttacatctgcataatcaggttcttttcttagctcttttggctctttaaccacaacctccaagccatatcgttcaccaacatatttctcaatacacgctttaatctcaagcagttgcgctgaacagaagtcacgaccaccagcaaagtccagatcttcactaaatctgtttgatccatagcaaagcctaagcgatgtaccgccctgaaatgtgatgtgctttaaaagccctgtggcggaaagagcataaagaatgtcataatgtagcaattctttttccacgacaggcctgttcgcgccgtaatccttttcgatgacaatgctgtcaactagctcattaaaattgacaaaatcagacatagtttaattcctcacgttggatgaggtgtgtatttctgccaaccttcattagatccttaatggcagtctcctttgttgcaattcttaatggcccccttccttccaccgtagtattgagtatttcaagaggcttcttggcagtatgggtaacctcaataacgccccaaggcgttacaaactctccagaccggcctgtggacataatcgtaagtctgtcgatggggatctgtgaaattacaccgtactgagatagagcggattccaaactaatgtagttgtagtggcctcgtcgaatattttcggccagacgttctaaagggtaaggccccaatgaaccttgagtatagatatatacaccttttgatgctcggcgtagcacatcatgcgcgatcagccggtcaactgatttttgtaatgttttcggagactcatcaggaaaaagcatttttaaatctttggtgaggaagatatttctaccttgcttactgaatttgttaaaaacattaattgctcttattaactccatatcaacctctactaaatcacccccaacgaggggttattttgtatatttgagtatagtacattaccttgatatacaaataaaccccaataaagggggtgttttgtatatcaaaacccccaataattaaattcaactattgggggttattaagtgttaaaccaaatcagtgagttaaactacaccgtaaacgggtattttatcgcctcgtgacactgataaccttcaacactaaagtcatctgtcgtgacccaagtttctatatcatctaatgtcttaatgtttggattaatatgtagcttaggtaatggcaatggctctctttttagttgaacatcacgcatcagaggtaattggttctcataaatgtgagcattaactatcttatggaatgctttacctggtttatgccctgtgatttgagccaccagcgctaataatacaaagcattgaatttgattaaaattcaaccctaatgggacatcacagctacgttgatatgaggttaaataaagcctgtcaccgagcaatgaaaaagtatgtgtatgcatgcatggacgtaaacaccctaacgctgtttctccgggattataaaaagtgactatctcaccacgatcgtcaataccgttagttaagttatctaccactttacgtaattgatcaaagtgcgagccatcagggcgttgccattggcgtccttgaacaccatagactcggcccatatcatcttcacccttacgatgcggattatttaaccatgcgctattttcattagcattcgcgttccacgtattacagccaatagcacgaaattgtgctgcattatcataaccacgtaagtaccctaatagttccgcaatcgcggctttgtaaaaacttttacgcgttgttatgagtggaaattggttattggcaacatcatattccagatcggcatttatcaccgttaaacaacgggttcctgtccgtttattatcaatccattcaccttcatcgataatgcgttgacacaatgccagatactgcttcatgtagtctctcttttttgttagctaataatagttagtgtgttgttggcgtctgtggagtggctttatcgcgacgatacgcccacaccataaagataatgcctaatattatcattggaatggaaagaatttgccccatgctgataccgctaaataaacctaattgcgcatcaggttggcggaagaattcaacaataatacggaaagcaccataaccaattaagaataaccccgatacactgcccataggacgatttttgcgcacaaagatattcagaataataaataataccacgccttctaggaacatttcatagagttgcgatgggtggcgaggcaatacgccgtattgctgaatgataggtaatagtgtagtgggatcttgcgcgacaagctgtagatcttctgcacgggagcctgggaataaaatcgcccacggggtatctaaggtgactctcccccaaagctctccattaataaagttaccaatacgtcctaaacctaaaccaaatggaattaatggagcaacaaagtctgcgacttgaaaaaagtgacgtttagtgcgacgagcaaaccaaatcatggcgcagatcaccccaattaagccaccgtggaaggacattccgccatcccagactttaaataggtaaagtggattatctaaaaataccggtaagttatagaataaaacatatcctagacgcccaccaataaacacgcccacaaaccctacataaagtaatgtttcgacttcacttttttgccaaccactgttaggttttgccgctctgcggtttgctagccataatgcaaacacaaatccaatcaaatacatcatgccgtaccagtgcaaagatactggcccgatagaaaacataactggatcgatttctggaaatttaaggtagtttatactcattcttccctacttcactttattaatgattttctatctatgggtcgatgtggataaccccttagacaaaaagtttatacgaaggcctatcagatacctccgcgaattaatccacctaatccttgtctttccataaaatcagcagacaatttttttatctctattgccgtttcagctttcaacacctgttgcataaaaggctgtaagatagcaggatctagatggcgcaataagtattttaccctaggtaaactacggccactcatgcttaactgacgaaaacctagccctattagtagcaatgcccccatcggcgtacccgccatttcaccacaaacactgactggtaactgataacgttggcattctaaagcaataatattaagcgaacgcagtaatgcaggatgcaaattatcatagagcagtgctacatgggtattattacgatcgactgcaagtaaatattgcgttaaatcattggtaccaatcgagataaaatctactcgatgtgctaattgcggtaacataaagaccaatgaggggacttcaagcatgatccccacaggtggtagaatgcattcgcatttcatttctcggctaacttcagcacatgctcttagtaacaatgctttcgcttcttcaatttcatcaatacttgtcaccatcggcaacaatattttcaaatttttaaattcaagattagcttttaacatcgctcgtagttggatcagaaatatttctggctgatcgagtaatattctgatcccccgccaccctaaacaagggttctcctcatttatcggcatataaggaagctgtttatctgcacctatatctaaagcacgtagtacgacgggtttattgggaaaaaatgataagatttcacgataacggtttttttgttcatcttcggaaggaaaaccgctttgtaacataaaagggatttctgtgcgataaagaccgacaccatctatgccaacgctaatacgttgttcatatttaatgcttagccctgcatttaattgcacactgatggattcaccattttttaataccgcttgctgttcaagctgctcttcagcaagttgactcaatactctttcttcatcaataatttgccgatattcctgcatgataaagggttctggttcaataaaaatctcaccacgataaccatcaagaatcagcattcggttgtgaagtagctccggttgaatatctgcccccataatggcagggatccccattgctcgaactaaaatcgctgagtgtgaatgagtcgcaccatcacgaactatcacccccgccagttgttgttctggcaactcagccaatagattggcactaagctcatccgccacaagaataaagcgatctggccatgtatttgtcgtgctgagatcatcatctaaatgaaatagtaagcgctgacctaatgcttttaaatctgaagctcgttctcgcatataactatctttaagacttgagaactgtgcagaaaacttctctatcaccacttttactgcccactcagcaacatagccttgttgtataaccccagtcattttttgtcttaattggggatcgttaagtaaatgcgaatagagatcgaaaatagccgcactctctttttgtgaatttgccataaagcgcttactaaaacggcgacactccgatgtcgcatcttctaaggcgaccgttaatcggtttaattcactttttatatccagtgcgctggctttaaaaacatgatctaaggttggctgagacatctcttgccaaccatatgccatcactacccccgtagaaacggatagggctttaatacggctttgacgatattgtccaaataatcctttcgtttgcacttgcgacaatatcgcccctaattgggtggccagtgtcaccataaaagattcttcgctttcattaaataagcgtcgctctttttgctgaaccaccagcaccccaagtaactgacgacgatagacaatgggcacgccgagaaaagcgcgcagatcatcctcttttacttgtggcagataggtaaaattaggatgttcacgaatatcagccagattaatcagctcagaaagacgtcctacttcacccaccaccccctcatcaaatgagaggctgacggcacgccctttcggctttttcaatccttttgtggccattaaatagaaacagcgatgaggaatatcggcaagataaatagaacacacatccgtgtgcatagcttgacacgtttctttcactaatagttcaagtgcttctggcagactcgctgccatagccactttttctacaatttcccgcaaacgtgtcagcatagtgttatctaataccttttacggcgatatccataggaaggacgagacatagacacttgttcttgtaatggcataactactggtgcgaactctttcatcacgcgacgatatacatctcgcttaaaagagacgacttgacgaacaggataccaatagctaacccaacgccaaccatcaaactctggcgttttgctctgctgaacattaatgtccttgtcgttacttgttaactgcaaaaggaaccaacgctgtttttgtccaatacaaacaggttttgtgtcccaacgcaccaaacgcttaggtaacttgtaacgtaaccagttacgcgtggaggcaaggattttaacatccttacgacttaatccaacttcttcgaacaactcacgatacatggcttgttctggtgattctccaggattaattcccccttgaggaaattgccatgaatgttgtccatagcgacgggcccaaagcacttgcccttgccgattacaaattacaatccccacattcgggcggtagccatcatcatcgatcaccagactacctcaataaccaaacttgaaagataactcattgtttcatactacccacaaacggtaaaccactatcaacagactttgcacaacgtgagtatttatctacaatgggaatgtctcaacggggtgctttttttaagctgagaaaaactcgtggaacctgatccagctaatactggcgtagggatttgagtcaggatggcgcaataataactcatttgcctcctcactcctcagatcctacttgactttttactgaggaaaatagcgtgttaataaattctcttcgttcaactctcttattcagtgcactaggtttgttcagtgcttttgccacaaatgcacaacaaaccaaacccacacttaccgtctatacctatgactcttttaccgcggattgggggcctggtccggcaattaaaaaagcatttgaacaacaatgtgattgtgagctaaaactggttgccctttcggatggggtttctctccttaatcgtttacgtatggaagggagtaaaagtaaggcagatattattttagggctagataacaatcttattcatgcggcaaaacagaccggactttttgcaccaagcaatattgatacatcaaaactagcattacctgaaaaatggactgatgacacttttgtgccttatgactacggttatttcgcttttatttacgataaaaatcgtattactcatccccctaaaagcatggatgagctgttaaatagccaacagccgtggaaaatcctttatcaagatccacgtaccagtacccccggcttaggcttaatgttatggatgcaatcactgtatccaaacaataccgctgagcagtggcaaaaattggcgaataaaacactgacagtaaccaaaggctggagtgagtcctatggcttattcttgaaaggagaaggggattttgtgcttagttacacctcatctccgggctaccatattttggctgataaaaaagacaattatgcggcagctatttttgatgaaggacactatttacaggtagaagttgcagccaagctaaaatccagcaaacagccagaattagctcagcaatttatgcaatttatgctaacccccgctttccaagaaaccatcccaaccactaattggatgtatcctgttattgatatgccactacctgaggtctactccgttatgcctaaaccgcaaaagtcattacaatttgatgctgatgtggtagccaaagagcgccaaacatggacacgtaattggcaatctgcggttagccgctaatgggtaaatggcttatcccggggctatgcgcctcgggattattacttaccgtcgcccttctctccttcggtgctttatggtttaacgcgccaagtggtgatttatcgactatttttgctgatagttacctatggcatgtggtgcgctttactttttggcaagcatttttatccgcgctattttccattttaccggcaatttggttagcaaaagcgctctatcgacgccagtttgttggcagaacgctctttttacgcttatgtgcaatgagtttagttctaccggtgttagtggcgctatttggcattttaactgtgtatggtcgcatggggtggctggctcaaatatgccaatggttagggattgattaccattttacgccttatggtttacaaggcattttactcgcacatatttttttcaatatgccactggctaccagaatgttgttacaagccttggaaagtatttctaccgagcaacgccaattagcatcacaattgggaatgaatggctggcaacgttttcgttttctcgagtggccctatttatggcgacaaatcctgcctactgcatcactgatttttatgctctgctttgcaagtttcgcgactgtattagcgctgggaggtgggcctgcggcaacaactgttgaattggcaatttatcaagcattaagttatgactacgatttacatcgtgcagcgctattagcattaattcagctattttgctgcttaggattagtacttgttagccaaaaattaaagggaacactctttgtcggtagtcatcaaaaactaagctggcgtgatcctagcgactcattaatcaataaaataacggatagtttaattatcgtacttgctatgctctttttacttcctccgttattagcggtgataagtgatggcttaaacagtcaattattaggtgttctacaacagccggtactttggcaagcctttacaacatcattaattattgcacttggcgctgggggactttgtgttattttaacgatgatgttgctctggagtagtcgagaattacgcttacgccattttaaaaaggccggacaagcgctggaaatgagtggactcattattctggctatgccgggcattgtattagcgacgggcttttttctattattaaacagcacaaccggattacctgaatctccctatcttttagtgatcctcactaatgcgcttatggctattccatatgctttaaaagtacttgaaaacccaatgaatgatattgcagcccgctataatctattatgtgcttcccttaatttgcgaggtattaatcgtctacgttggatagagctacgcgctttgaaaaagccactatcacaagcactggcttttgcttgtgtcatttccattggtgattttggtattgttgccttatttggaaatgaaacttttagaacattacctttttacctctatcagcaaatcggtgcttatcacacacaagatggcgctgtcaccgcgatgctccttttgctgttatgtttcacgctttttagccttatcgaacgcgtttcaggaaaatcctatgattaagttagagcagctttcttatacctatgagcaccaacatctgacctttaatttaacggtaaaagcgggggagcgtattgctattttaggtcccagtggtgcaggtaaaagctcattactcagcttaatagcgggttttctgccctcagagtcaggctcgttatttttaaaagggaaagatcataccaaaacagcccctgcccaacgccctatctcgatgttatttcaagataacaatctttttcctcatctcacggtaagacaaaatattggtttagggctagatccagggctaaagctcactgtggcacagaaagcactattagaaagtcgagccaaacaggtttctttaagtgattatctagagcgtttaccttcacagctatcaggaggtcaacgtcaacgagtggcaattgcccgttgtctggtacgtgaacagcctattttattgttagacgaacctttttccgcccttgatcccgcattacgtatcgaaatgctgacattattagaacaaatttgtgatgaaaaaaatctcactttactcatggtgtctcacagcttagaagatgctcataaaatcgcaccaagagcgcttgttattgataatggcaccattgtctatgatggaaatacagcgtcattaatcaaaggcgaagtggatcaatcactgctgttagggataccttttaattaatctattgaaatatagcgatatcgaaagaagcttattcccccctacaagcctctttcgaatatttcgaatacttgactatttttcgaatatttcagataatctagttattaaaaagggggaaatactaatgaatacgataagtgagagacttagtgctgaagatattgcattagcaaaattaagtagccaagagctatccgctgttatggatattaatggcaaaacgcagaagctatccattatagataagacgggtaataatcatattgtacaaataccaaatagtgcattacgcctaatgattgaaattcttactcaactagggcaagggaatactgttagtatcacaccaatccatgctgagctaacgacacaggaagcggctgatatactcaatatgtcccgtcctacatttgtaaaattattagatacacgagcgataccctactctagaaaaggaaatcgtaggaaagttgcttatgctgatattgttgcttataaaaatgaattggagcaaaaacgacttgatgcccttgctgaattatcgcaattagatcaagaaatggatatggggtattaatgacaaactatactgttttgcttgatgcctgtgtcatgtatccagcccctcttagaagttatttaatgtatcttgctaatactggtttatttagagcacgttggagtaatcagatccatgatgaatggatcactaatttattagtcaacaatccaacattaacagctgagcgactaatacgaaccagagatttaatgaatgcacatgttcctgattgtttagtagaaggctacgaaccgcttatttgtggtttaaagctacctgatcctaatgatcgtcatgtgctagcagcagcaataaaagggcaggctcaagctataattacatttaacttaaaagattttccgcaaaaataccttaattcttttgatatttcagctatccatcctgatgaatttttgagtgacatgtttgaattaaatcctagtagctgtattaaagcggcgcaacaacatagacaaagcctaaagaatccaccaatgaccgtagagacctttttaggctgtttacaaaagcagaaattaccccagtttatttcccatttacgggcattccagatattattataagtacatcaacccgtgtaatatcccatttcctatcataacaaggctatgattaatattataattaatagttaacgatctctttttcaagcttcaatatctcgcttattaggaaattatgacaattcacacagagcaaggctttattcttacccgccattggagtgataccccacaaggtatcgctgtctcctattggttggcgacagaaaatggaccgcgtaaagtcacggttgcaaagcagtatgctattggttttgttgcccaacaaaatgaaagtatattacgctcagtggttggtcataatcgcgatattgatattcgtcctctggcgttaaaagactttgaaagacaacctgttttgggggtttattgtaaacaataccgccaacttacccagcttgaacagcaattaaaacagtataatattcgcctgtatgaagccgatatccgcccacatgaacgctatatgatggagcgttttatcaccgcgcctgtatggtttcgttatcaaaatagtcatactgtcacgctaaaacctgccagtgattatcgtcctacattacgtaccgtctctttagatattgaaaccagtgagtttggtgagctttattctattggattagccggttgcggtgataacgttgtttttatgcttagtgacaccctcccagaagttcaagaaagccaacaacctgaaggctatcgtctgtgctatgtaagtagtcgattacaactccttgaaaaactaaatgcttggatacaagagtacgatcctgatgcgattattggttggaatcttattcaatttgatttgcgtatcttgcatacccatgctcagcgttacgggatcaatttattattaggacgacaaaataccccattagagtggcgtgaacatggctttaaagcggggcacttttttgcctcagcacaagggcgtttaattattgatggtattgatgctttaaaaatggcgacatggaattttccctcttttagcctagagtcagttgctcaaacactgttaggggaagggaaagcgattgatacaccttatgccagaatggacgaaatcaatcgccgttttaaagaagataagcccgccttagcgtattataactggcaagattgtgtcttggttaatcgtatctttgataccacacacttaatggaattcttattagaaagagccagtgtaacaggactggcagcagatagaagtggtggctctgtcgcagcatttactcacctctatttaccctcaatgcatcgtcttggttatgttgcccccaatcagggtgaaaaacccgaagagcatagccctggtggttttgtcatggactcaacaccgggtctctatgactcagtggtggtactggactataaaagcctatatccctctattattcgcacctttttaatcgatccggtgggaatgattgaaggtatgcatcaccctgatagcacacatgccgttcccggttttcgtcaagcgtggttttcacgagaaaaacactgtttacccaccattgtttcacaaatctggcatgaacgagataatgctaaacgtcataacaacgccccgctctctcaagcattgaaaattattatgaatgctttttatggtgtattaggctcggtaggctgtcgtttttttgatcctcgattggcttcatcaattactttacgtggtcatgaaattatgaaaaagacccgtgaattaattgagtcaaaaggctatcaagtgatttatggtgatactgattctacttttgtttggcttaaagccgctcataacgaagtacaagcagagcagatcggtcgtcaattagcgcaagatgttaatcaatggtggaaaagctatctgactgaaacttaccagcttgatagccaattagagcttgagtacgaaacccattatcgccgattcttgatgcccactattcgaggtatggaaaccggaagtaaaaaacgttatgcaggactaagtcataataaaatggtgtttaaaggattggaaacagtcagaacagactggacaccactggcgcaagcgtttcaaaaagagctttatacacgcatctttaatcagcaaccttatcaacagtttattcgtgattatgttgctgatacgctattaggaaaatatgatgatagactggtttatcgaaaaagattgcgacgaaaattatcagactaccagcaccatatcccccctcacgtcaaagcagctcgattagcggatgactataatcagttacaaaataggccgcaacaatatcagcaaggcggttggattagttatataattactcacttggggccagagccgttagagcatatcacttcgacacctgactatgaacactacattaataagcaattaatgccgatagcagatgctattttgccatttctacaagatgatttttctaccttgttaaatgggcaaatgacgctctctttttaagatgtgttattttgcaggtgacggcttgctttgcatctattaacataacgcccctttggtgataatcaccttttttctcatcttgagaaagatactattttttatcccgtagattggatgacaacaccgcaatactgcattcattaataatgattttataaattatatatttgagagctgagtttatatatatgccttttactcttggtcaacgttggattagcgatacagaaagcgaacttggactaggtactgttgtggcaattgatgcccgtatggtgaccttactttttcctgcatgtggcgaaaatcgtctttattcccgccatgatgccccaataacgcgggtgatgtttaatgtgggggatactgtcaccagtcatgaaggctggaagctcgccatcgacaacgttgtggaagataatggcttacttatttatcacggcgtacgtttagataccgaagagccagcacaactgcgtgaagtattcttagataacaaactcacttttaataagccacaagatcgtctttttgctggtcaaatagaccgtatggatcgttttgctttacgctatcgtgcgcgtaaatttatgagcgaacagtttaagcaagcacaaagtggtctacgtggtattcgcgcaagtcttattcctcatcagctctatattgcgaatgaagtgggtaaacgtcataacccacgtgttttattagcggatgaagttgggctgggtaaaactatcgaagcgggtatgataatccaccagcaaatcatggatggacgcgctgagcgtgttttaattatcgttcctgaaagcttacaacatcagtggttagttgagatgttacgtcgtttcaacctacgtttttcactgtttgatgatagccgttatagcgaatctttattagatagcgataatcctttcgaaacagagcagatgatcatttgctcattagactttgtgcgtaaaaacaaacaacgctttgaacaccttgttgaagcgacttgggatatgttagttgtcgatgaagcccaccatctggtatggagtgaaaaggcaccaagccgagaataccaagttatcgaaacgctggctgaagcgatcccttctgtattgttattaaccgcaacaccggagcaacttggtcaagagagccattttgcccgcttacgtttgctcgatcctaatcgtttccacgattacaacgaatttattaatgaacaacaaaaatatcgccccgtggccgatgcggtaaccattttgctttcagaagatgatttaaataacgaacagcaaaatagcatcagtgagatgatcagcgagcaagatatagagccgttgctaaaagcctctaatacccaaggtgaagagcgtacaaaatctcgccaagcacttattcatatgttgatggatagacacggtacgggtcgtctgttatttcgcaatactcgctccggcgtcaaaggcttccctaaccgactgttgcacgcaataaaaatgccactaccaactcagtatcaaaccgccattaaggtggctgagattatggcagcgaaaaagagcctcgaagtacgagcaaaagagatgctctatcctgaacgtatctaccaagagtttgaaggtgaaaatgccacatggtggaactttgatccacgcgttgaatggctactaggctttttaaccgccaatcgtcatgaaaaagtattagtcatttgtgctcaagccgccacagcattgcaattagaacaagttttacgtgaacgtgaaggtattcgtgctgcagtattccatgaagggatgtctttacttgaacgagatcgtgcagccgcttatttcgcctcagaagaggaaggcgcacaagtgttactatgttctgaaatcggttcagaagggcgtaacttccaatttgctaatcaactagtgatgtttgatctcccctttaatcctgatttattagaacaacgtattggtcgtcttgatcgtatcggtcaaaaccgcgacattgatatcagtgtgccttatcttgaaggaaccgctcaatctgttctattacgttggtatcacgaagggttagatgcatttgaacatacctgcccgacgggtcgtacaatttatgacaacgaatatgatgcgctagtcaattatcttgctcaacctaatgaactaggtgattttgataagtttatcgtttcttgtcgtaagcaacatgatgagatgaaactcaaactagaacaaggtcgtgaccgtctattagaaatgcactctaacggcggtgaagttggcgttgagttagcgaataagattgcagagcaagataacgatcccgatctggttaacttcgccttaaacttatttgatattgtgggcattaaccaagaagatcgtagtgatagcttaattgtattaacgccatcagatcatatgttagttcctgacttccctggattaccgcaagatggttgtacaattacctttgatagagagcacgcactctctcgtgaagatacgcaatttatcagttgggaacatcctattatccgtaatggtttagatttagtcttatctggtgatacaggtagttgtgcggtttctttattgaaaaacaaagcattacctgtaggtacgctattagttgaactgatttatgtcgtagaagcgcaagcccctaaacatcttcatttaactcgcttcttaccggcaactccagtacgcttattacttgatttaaaaggtaataatcttgcatcacaagttgaatttgaaagttttaaccgccaattaaatgcggtaaatcgccacacatccagcaaattggtcaatgcggtacaaaatgaagttcatcatgtactaaaagcatctgaatccttaatggaagcggaagcgaaaacgctaattgaacaagcgaagcaagaagctgacaacgcattaacacatgagttatcacgcttagaggcattacgtgccgttaacccaaatatacgtgatgacgaagttgaagcaattgaaaatgagcgtacgcatattcttaaccacttagatgaagcgacatggcgcttagatgcgatccgtttaattgttgttacccaccaataatcactgttaaaacgggggaaagctttatctcccccgttattttgctgagatatccactatgatggaagtttataacccccccactgatccttggttacacgttttatatcaagatgagcatattattgttgttaataaacccagtggattgctatctgtacccggcaaagcgctagaacatcacgacagcattatgtcgcgtataaaagccgattttcctgatgcggaatctgttcatcgccttgatatggccacgagtggtgtgatggttgttgcgcttaataaagccgccgagcgtgaattaaaacgccaatttcgtgaacgagagccgaaaaaaacctatattgcccgtgtctggggaaagcttgaaaaaccacaaggattagttgatctgccgttgatctgcgattggcctaatcgacctaagcaaaaagtatgttatgaaacaggaaagtctgcacaaactttttatgaagtgttggaatatgaagaaaatgcaacgcgggtaaaactatcaccaataaccggacgctcccatcagctacgggttcatatgctagcattaggtcatcctattttaggggatcgtttttatgcccatccgcaggcaagagcactcgcacctcgcctgcagttacatgctcaggaattatttattacgcatccggcctttcattcaccgatacattttgaatgcctggcagatttttaacctgtcttacgacactaaaacggtcaccgaacttagtgaagcaaggagcagacagagcgctaatcctattaccccaacaagaacacggacgtttgacattgatatagttccttttataagagaatgagagtgaaataattaaatttcacttatattttaccgtgacaaataataatctcaactaagactgagttatcttcatcacggattaattctctcttttctcatctttatttacaagatgttaacgaaatcctttttcttttttaatcaaatcgtaagcaacttggatagcttgtgctttttgttttgcaatttccatcatctccggtggtaaaccttttgcaaccaatttatcaggatgatgttctcccattaattttcgataagctctttttattgttttaacatcatccccctctttaatacctaacactttataggcgtcagaaagcgttgggccttgagtttgtggctgataattttgcccttgttgataatgaaaactttgccccgcctgcatcatggctaatatatgttcaaaacgggcgcgagaaaatccgagctcatcaataataataaacagcattttacgttcgttaggatgtaactgcccatcagcaaatgcggcttgtaattgaatttccagaaacatctgcagtaaatcacggcgaccggcacaaatttggcgaacacgttgtaaggtggctctaagtgggaaatcaacctctttaccttctcgaaacgcctgttgtgctgcttgacgtgctgccccatgtaaattcattctatccattaacgtactggctaatgtgatatcggtttgtgtcactcgtcctttggatttggttaaatgccctaagacttggaatgtggcagcaaagaaataggcttgtctatcacgattatagcgcccaccatagcttaatttacttctttgtacgtcataaaggtgtcctagaaaaaccccaatcacaatgccccaaaagccgatcccggcaaaactaccgatgataaggcctaataattttccccaatagcgcatagactcctcaaatcttcaatgccctgctcacaattttgcattatcatactattcatttgctttcacacctaacatcaagcaagctcaaataaactttttcttaaaatgatgaggttttcgctagctgcttgcacagagataatgctgttttcgtttaaattgtgttaaagtaaaataagtgaccaaacgaataactttagcgttgttatgcagcacgaaataccgcacaagcgcggtgtttttttgtttctaataaagctataaaccgatttcaacatagaaacatcgaaaaaagggaactgctcttttttcggttaccgttagaacaatgttcaggacgttgggctagtgttgcataactccctgcgttagtttctcgctatttagcagtagaagccactgatgacggaagcacataaatactcatgaaaaaaagttatcccacactgctggccaccttagtttgggccacaatttatgctcagcctgcatatgctgatcttgcctctcaatgtttactgggagtccctgtttataataagccattagtcgaaggcgatcctaactcattacctgtcaccattacggctaaggatatgcaaggggaatacccacgcatgatccaatatagaggcaatgtagacattaaacagggaaatcaaacattaagcgcagataatgttgagttgacccaaacagaaggtgaaacaccattaagaatggtcaccgcgacaggtaatgtctcttatgatgatccacaaatcatcttaaaaggcccacgtgcttggtctaatctaaataataaagatactgatatcgaagaaggtaaataccaaatggtgggccgacaaggccgtggctacgcgaataaaatgcaaatgcgtggcgaaaaccgctataccattatggataaagggatgtttacctcttgtctacccggcgacgatagttggagtgttgtcggctctgaggttatcttagatcgtgaagagcaagtagcagaaatttggaatgcacgttttcgtgttgctaacgtcccagttttctatagtccttatctgcaattaccgattggcgataaacgtcgctctggtttcttaattcctaatggtaactattctcgtagttctgggtttgacttccaactgccttactattggaatattgcccctaattatgatgcgactattaccacgaattatattagtcgccgtggtttaaagctcgataatgaatttcgttatttaacaaaaccgggtcgcggtacgattgcggttgattggatccaccacgacagtcaatacaataaagataaagcagacgaaaaagcgggttatctggcgcgtgattctgctacacgctggttattctattggggtcacagtggggtgatgaacaatgtgtggcgctttaatgttgactacacaaaagtcagtgataacaaatatttcaccgactttacttcgcaatatggtaataccactgatggttatgcgacgcaaaaattcagtaccggttatgctcagcaaaattggaatgccacattaaccactaaacagttccaaattttctcagataataaagatgcaagggcttatcgtgctgagccgcagcttgatcttaattattataaaaatgatattggcccatttgattttcgtacttatgcacaatttgtccgctttaccagtgtcggagaaaacacccctgaagcgaaccgttatcatatagagccaaccatttccttacctgcctccactggctgggcaagctttaataatgagtttaaattgatggcgactcattatgatcaagatattcctgatgcttataaaaataacgctaaaaatccaagacttgatgatagcgttaaccgcgtactaccacaatttaagtcagatatgaaagtggtatttgaacgccaatatgacactaacgatattacgcaaacgttagagccacgagtacaatatctatatgtaccgtataaagatcagtctaatatcaataactttgactcagcgctattacaatccaactatagcggacttttccgtgacagaatgtacggtggtctagatcgcattgcttctgcaaaccaattaacggcgggtgttacttcacgtttttatgacagtgaactggttgaacgttttaatatttctgttggtcaaatctatttctttgagcgtccgaaaacaggttcatcgaatgaaattatcaatagcaaagatgaaaccggatctatggtatgggcaggcgatgcatattggcgcattactgatactttaggtatgcgtggtggtttacaatatgaccgtcgtttaggcagtgtctctatgggtgatgcgattatggagtatcgccgtgatagcgaccatctcttacaattgagctatcgttatgtagaccgtgattatattcaagcaacacgggttcgcccttatgatggcggggtcaatcaactaccagaataccaaaaaggcatttctcaaattggtgttgtcggcagttggcctttagcagaacgttggggactggtcggcgcttattactttgataccaaagattcagagccagtaagccaaatggttggcttacaatataacacctgttgctgggcggtaaacgttggttatgaacgtaaaattgttggctggaaagaagaccacagcgatattgacaacaaatggtcaatcaatttggaactcagaggcctaagtaacaatcatagtttaggtagtcaaaaaatgcttgagcgcggtatcttaccttatcaaagagcgttttgattaacccaaacgacaaaattggctgaatgaatatgtcatcgcgcaaaatgcggaaaacacataatgggaaacttatgaaaaattggaaaacgctggttatcggcttaatgatcacggttggtgcagccaccagcacaaccacttttgcagcacaagaactcaaccgcgtatcggctatcgtcaataacggtgtcgttctggaaagcgacgtcaatagaatgttacaaacggtgcaaatgaatgccaaaaatgccgggcaagaaatgcctgatgagcaagttttgcgccaacaaatcttagagcgcttggtgatggataacatcatcttgcaaatggctcaacagatgcaaattgatattcctgaagctgccgttgagtcaaccattcaagggattgccgcagaaaacaacctgacactagagcagttaaaaaaacgtcttgctgccgatgggattgcctataacgattatcgtcaagatattcgtaaagaaatgatgttagcagaagtgcgtaataacgaagttcgtcgtcgtattacgattttgccacaagaagtggactcattagctaaacaaattgaaagccaagcaagccaaagtattgatcttaatcttagccatatcttaattccattatcagaaaatccatcacctgcagaaattgaaaaagcacagcaagtggtgaaccgtattaagaaccagctaaaaaacggtgctgatttcggaaaattagctgccacttattctgccgatccacaagcacttaatggtggtaatatgggatgggcatcaattgatgagttaccgacaatctttgctaaacagcttgctaatgcacaaaaaggtgaaattgtcgggccactgcaatcaggtgttggtctacacattattaaagtcaatgatatacgtggtgcttcaaaaaccgtttctgtgactgaagtaaaagcacgccatatcttactaaaaagctcgcctatcatgaatgatgagcaagcttatgccaaactacagaaaatttccgccgatattcgtagcggtaaaatcagttttgcggatgcggctaaagagtattctgaagatcccggttcagcattacgtggcggtgagttaggatggtcaatgcctgatatttatgatccagctttccgtgacgcgttgatgcgtttaaacaaaaatgaattaagccaacctgtgcgctctaattttggctggcacttaattgaacttgaagatacgcgtagcgttgataaaacagatgcagcgaataaagaacaagcttaccgcttactgtttaaccgcaagtttaatgaagaagtgcaaaactggatgcaagagttgcgtgcaggcgcttatgtgaaaataatgaacgagaataatgcaaactaagctaaaaaaacccctcgttatcacccccggcgaacccgccggggttggtcctgacctgattatttcattagcacagtcacagtgggcacttccttgggtagtatgcgctgatcctcaattattacgagcaagagcacagcaactcaatctcccactcactttagttgaatattccccagataatccacctacagcacatatccctggccaaatttgtgtacttgccgttgaattaaccgacccttcggttgtcgcaggtacacttaatactgccaatggccactatgtggtacaaacgcttgctcgcgcttgtgatggatgtttaaacggagagttttctgctttagtcacagggccggtacataaaggggttattaatgatgccggtgtgccatttacagggcatacagagttctttgccgatcgtagccattgtcaacgagtggtgatgatgctggcaacggacactttaagagtcgctctcgccaccacacacctgcccttaagagaagttgctgatgcgattacgggtgagttgcttaatgagatcatcaccattttaaaccatgatctaaaaaccaaatttggcatctcatcaccacatatttacgtatgcggtctaaatcctcatgctggagaaggcggtcatatggggcgtgaggagatcgatattattgaacccgcattagagcaattacgccaacaaggtattcaacttcatgggccttaccctgcggataccttattccagcctaaatatttaacacatgcagatgctgtgcttgcgatgtatcacgatcaaggattacctgtgctaaaatatgaaggtttcggtcgtgctgtgaatatcacgctcggtctaccttttattcgtacatctgttgatcatgggaccgcccttgaacttgcaggtactaaaagcgcagatgctggcagttttcgcaccgcattaaatttagccattaatatgatacaaaattgtaatgaataatagagtccatcaggggcactttgcccgcaaacgcttcgggcagaactttttaacagacagctatattattgaaagtattgttgaatctatttatccacaacccggtgaagccgttattgaaatcggtcctggtttaggcgcgcttactgagccggtgggggaaagaatggataaaatgacggtcgtcgaaattgaccgtgatttagctgcacgcttagaagttcaccctacattaaaagataagctaaccattattcagcaagatgcgatgacgattgattttgcccaattagcaaaagagcgtcagcaacctctgcgggtttttggtaacctaccttataatatttcaacgccattaatgttccatctatttagttttgctgatgccatttctgacatgacttttatgttgcaaaaagaggtggttaatcgcctagtggcaagtcatggtagtaaaacttatggccgcttaagtgtcatggcacaataccactgccaagtcattcctattattgaagtgccaccaagctcatttaagccagccccgaaagtagattctgccgttgtgcgtctgatcccttataaggaaaaaccctatccggtgacagatattgctatgttaagccgtatcacatcacaagcctttaatcagcgccgtaaaacgttacgtaatagcttaggtggactacttacagcagaagatatgctggcattagatattgatcccactgcacgcgcagaaaatatttctgttgagcaatactgtaaagtggcaaactggttatcatcacaacagcaacacgctgagtgaaatagcgcacactagacctaggaggtattatgtttacttcatccaaagtggcgatacaggtacaaagcgtttacattgagagccaatcttcgccagaagaacagcgctatgtttttgcttataccatcaccatacataacttgaataaacatgctattcgcctcctacgtcgctattggttgatcaccaatgcacaaggaaataccactgaagttcaaggtgaaggggttgttggtgaacaacctctgattgaagctggctcacggtatcgttataccagtggcgcagttcttgaaacgccgatgggcaccatggaaggtcattatgaaatgattgacgcacaaggacgtctgtttcaaattgacatccctgttttccgccttgctatccctacattgataaattaattatggctacttatttaattggcgatgttcacggctgttatcgtgaattacgccaacttctcaatcaagttaatttcgacgccaatcaagatacactttggttaacgggggatctggttgctcgaggacctgattcacttgaagtattgcgttttgtcaaaagcttaggctcagcgttaaaactcgtattagggaatcacgatctgcatctactgggggtatttgcaaagattagtcgtaataaacccaaagataagcttaatgaattactcaatgcaccagatgctgatgaattaattaattggttacgacgtcaaccgctattacaagttgatgaagaaaagaaaatcgttatggcacacgcaggtattacccctcagtgggatttagcaacagctaaaaaatgtgcccgagaagtagaagccatattaagtagcgatagttacccccttttcattaattccatgtatggtgatatgcccaataattggtcacccgaattaactggcttaccgcgattacgctttagcaccaatgcttttactcgtatgcgctattgttttcctaacgggcagttggatatgatttgtaaagataagcctgaaaatgcgcctgcgccattaaaaccttggtttgatttacctaatcaactaccaaatgattacagtattatctttggccactgggcctctttagagggaaaaggcacccctgaaaatatctatgcgctagatactgggtgttgctggggcggtgttctaacctgtctacgttgggaagacaaacgttattttatccaacctagtctcacacacttaccataattttgtagcgttaagatagcataggtgttgatttattttactatgctatctgggctatctactctcttctgagagccatcacaaagataacttgatttaaatcaataggttattttttctcaaaacaaattaagtagcttttttataacaacaagcagaattaaccgctatattgcgctatttattatagattattctttataaagatatttattaaaagataaataatgaatatttaattatagggtactctttatagctaattatattttagttatagtatctattcatatttaaatatgaatatattaataaattaataaaaataaaaaggagatatttaatctccttttttatttaaattttgttattttcttctttttaatatttcaaaacagtagttatgcgaattattttcatctgcctcatggtattccataaaagtagaatcccactcatcaggctcataatcggggaaagttgtatcaccaatcacttcagcatcaatatgagtaaggtataatttattcgccattggtaggaattgctcataaaccttaccgccaccaatcaccatgatttcatcattattttcagcagcttgtagtgcttcttcaacggatttcacccaaacaacattgtcatcatttccaggctgactgcttaatacaatattgagacgattaggtaaaggacgcccgatagactcataagtcacccggcccataataacgggtttatttaatgtattttttttaaaccatgcgagatcaccaggtaatgtccaaggcatcgccttttccataccaataatacgatccgccgctaatgctgcgattaaactaatattcatttacatacctacgggtaaaaatgggaaaactatttatactatacggaaagcgaaaacttgagtcgatacaatttatgcttcaccgataataaataattgctttatacaggaagtgttaacttaatcatgaaagctttaaacattataatagtgctatatggcagttgctattatatttgaaaattctttaggtgtttttacaattactttacgctcattacaggcgcgagaaccttacttttttctcatcgtaaaaaatgtagcactttatcaataacatgcgaaaagaggcactgctacttctcattgactggcttatagcacttttaacattaaagtatcacctttcgttaaggcaatcatacgattgttgacatcctccacgccctaaaggacgtggatccctactgcgttcagactgatgtctgaatcaactcggcgggttcctgcttcgacgggcggtctgactgcaccctccctccacaggcaagcacggcatgtcctgccgctaaaatgttacgtgccccgttgatatcagcattcgctgtatatccacattcaaggcactcgaattgactttgtgactggcggttttcctttgctgtatgaccacagtaagcgcacttctgactggtgtaggcagggggtattgccagtacctgaccacctcgccagagctgcttgtactcaagctgacggcgcatttcataccagccctgctccagtattgagcggtttaaaccagatttagcttttacgttccgtccaggccgttctgtcgtaccttttgccgatttagacatgttactgacctttaagtcctcaatgacaatcattgcgtggtttttgctgatttcactggtgactttgtgaaggtagtctttcctaatattggcaatatgagaatgcagacgttgaattttgcgcttttgtttttgccagttggcactgaatttgattttacggcttaatttccgttgaagccttgccagctttcgctggtttactttaaaactgctgacgggcgggtataccgtaccgtctgaaagcgtggcaagttttgtaacgcctgcatcaagcccgactattgaggttgattcatgttgtggttctgtcgcttcatgctcagtctgaatgctgacgtaccatttaccgcatgactgactgaccgtgacgtttctcacttctccgacgacttcacgactgttgcggtagcgcatccatcccaactttggcaatgatatacgactattggattgatcgagcttcacgccctgcgggtagcgaaaagcgtcatttttaccgcgtttcttgaatcgaggaaaagcggtacgcttctggaaaaaattcttgtaagcccgttccaaatctttcagtgactgttgtaacggttgtgatggggcttccttcaaccattgtgtctctgtgtcagatttccactcaatgagccatgaagccatttttgtatagggaatgtatttattccctgcttcgtaattctcattctgacgtgctaatgcccgattgaaaacaaaacgacaagcccctgcaaagcgtctcatctcacgctcttgctgaccattgggtcttaactggaatttaaaggcttgtagacgtttcatattgcctattatactttggtctatgaaaaatgaaactaatattttccttggcagacattgtgtgttcctgatgcacatccatttggtctttgtcacaaaatacaggcgaaaaatatttgatcaggatgcaattgaaaaatggcgaggctactttgccagtgtttgtgctgattttgatgttgaactggttgaaatggatggggaacgggatcacgttcatttactgattaattacccgccaaaactggcgatatctaatctggttaacagccttaaaggggtatcgagtcgattacttcgacgtgatcgtcctgatattgcccaacgtgattactacaagggggttctttggtcgcgagttatttcgcggggagttgtggttgcgcaccaatatccattatccgccagtacattgagcaacaggaaacaccgagttagttaaaaaaccgcgccttatatccccgacctgaaggacggggttttacggtgctttggataaaaagaactaaaataggtgtaaataattatcaatgtaataggtgtaatcgattattaatgaatcaaaattccaatccttatcgtcccttaagtaatcaataatatccagtaaaatatctttatatttatctttaagatcatcacactcattgtctattttttctaaaatattctcatgattatttctaataacattagcaatggtatatttcatttcatcactattttcattcttagtaaaaatattttgcattcttctattatgtttagtgataaaactctcgtcttccattgtcatttttttagctttaataatatcttttttttctaacactcctaatgtaagcatatcatctacaaacttttgaacgtcttcattatttcttaatttattagtcaaaaaatttgatattgactttttaaaagcatcgttaatatagtttaccgtattatattccattgctttatcaataaaacatttagttatattgacaataaacgctttatccatctccaccgaataaatactatacattatagtaactaaattcattattgaattaattaattcattattatcttttctattaatctctttacaaacataacttaatgccatatcaatatgttgtttatagttaaaatcactataatataccatatcatcgcactttgggtgatatttcttcaattgttcaaacatttcttttggataatgattaattatattgaaagcaatgtttattatagtaataaagtctccttttgtttttgatttttcataaagataacattgtattaatcttttaacatcatcatgacaatcattttttattgcataacttaaagttaaaaaaaatgtatctaaatgtttattcttaaagctaacaaaatctgagttaattagcttacagtttttaaaatatacttcccctccatttctcatcaaaatggataatgtattaattttcgcatgttgacttttgtctaatagaaaaaccaccccaacattaatattaaaaatactctttataaaaaatgatattttagatagtaaagtaatcttttccctttcaatataaagacttgaaagcgtatttaacacatcattgattttattttttatttggtatttctcttttatattttcatcgtatttttttattgaagtaacgctatcaaaattattttttatatgcataaaaactccttatctcatagtaaaactatcttttatttatctacatattcatacaaaaaaaagcccttattactaagggctataaatatcaaaaaacaaataaggtttagaaattaattttcaatattgcattaataccactcgaattgatatcactattatattgaccttgataagagataccgaaagtggttgatttacttaactgcgcatcaacacctagaccaacaccaaataaattatctagtttaccacctcgtagtgatgcctcacctgaattggataaccatagacgtgattcagggcgattatcaccaaacagatggcttgctgatatatcaccttttaatgccatattaatattgcctgccataaatggatatccaccacgtaaaccaaccgtagcaacttgaatatcttgtgcatctgttttagtggtaaacttcatattacccacattttcattgatattatcagtggatactcttaaccaactaaatccagcataaggttcaattgagtactggctagtattcaattgagtataagcaccttctaaaaagaattgactaattttcgcatcgtaactggttgagttataacctgcagtttgtcctatccagagtgttcttttggcatctctatcttggtttgtatgtgtaaatccataatttaatgaggcaacatcataaagattagagatcccataagcaccaatatgaatatcattactatctatctttccatattgattacctttatatttggtggagcctgcaccgaaaaatagacccgctttagtattttcagtaacatcaatttcagcacctaataacccaacatagaaatcaacatccatatcactgtggccataatccgtcttaccccactgacccatgccgctgatccaaatacgcgcattactattacctagttgtgcatggcgaccatcaccgataccaatagcctgatctttcactgtacgagttaaacccaatacattaacaatactggcattattggcatttaaatacatatcactacccaatgattgataagtggttttcagatcattttcattcatcggtaatacagcattaaatagctcaccattccctgtattatctaatgcattagcaatagcacgaccattttcattatcagcaaaggtggctaaagtcgtattttctttcttagttaaactaccactgatggttttatctgttatcgtgatatgtttatcaaataaagcataatcattattggtgacagtagtggttgtggctggatctgcaaccacacggttactggctaacattttcgttttagtgcgattatcaactaaactatctgtattcacctcaccgacaacaacactattattaagataaatatcttttagttgcccaacattatccgcccccacatcaatatcggctccttgattaagcactaagttaccaatattaacattgtgtcctgcggtcactaaataacgacctttatcattaatattaatgtttactttatggttttggtttgaggttaattggcctttttgagtaaaagtatcgttataacgctcaataatacctaatttcccaccattaacattgacggcttgcgtcccaaaagatccgctaaagccatataaagtaccttgttcgacagttgtaccaccacggtaactattatttcccgtcatgactaacgtaccttcgcctcgcttcaccaaagcaccatcatataagccagcatcaattttagcttgaatagcatcagcgcgtttttggtaatattcttgacgccatttttcagcatcttcttggctaacaatatgcgatgtaggatcaggattgccatcattaatcacaaaatcagtaccgagatgataatcacctcctgccgcaatacctttttcggtatattctttcaaccatgcgagatcttcttgcttacgtagatctaaagctgtttgggaaatatcattagtccacacatcaagcggtgtcgcatttaggttatattcaaatttacctagcaattgacccggaccatacatccctttatctaaatctggtgttccccacccataacgtacatcgggagtaccttctgcagccgtccagctctcatataaagagccatcaggatcacgatggttagcggtagtgaacatgacatcacgaacttgaatggcgttcatggaaggataacgagacattaatactcccatcgcccccgtcacatgaggagctgccattgaagtaccactaaaggtatcccaacctggatttccctctttatcaaccactgtagaatagatatttcgacctggtgcaaccactgtccaccattttgcattacccgcttcattgaagactttttctaatacataaccggtgttatccgcattttgcttcaatcctgccaccgcaatccaatgctgttcggcttcgggattaaaataaggataaagaggacgataataaggttgagcaaagtcgcgattacccgttgtaaagacctgaacaacattcgttcctttaactgcatcataagcagcatcaacaaaggaaggtttatcaccatagacttttttaaagtagaaatattcgtattctgtctgtgccgtggtgttaacaggcatatgtatcgtggtattaccaccatcaggcccctctgttttatctgtattaataatgcgcgggttagtcccccagctattattaatcacttgcgcacccgcgtcgaccatcgctttccagccagtatagaaataggtatagtcttgataagggccatagttattgctgtctgttgccccagtattccctaaataaatatcagccccccacgccacaccatgcataccattaccatcacggttagcccccacagtaccagtgacatgtgtgccatgggtatcattcacccctttgatccaattaccatcaacatcaaagacttggcctttttcataatgtccgcccatttcttgtggatagcgcattcccgtagagccatattcacctttggcttttactgcatgaaaacgagatccactcaactcttgatgtgagagcagtgcaccagagtccatcaccccgactttagcaccttgaccatgaaaacccagagcataagcactagaggcattcatggctgcaagcccccagtctttttgatattcagggctttcccaactttgtttattacctaattgtccaacttctgaatatgcaacagcatagccagaaaaaagaagtgccgaagtaataagggagagttgaaatagagagtttgtggtattttttttctgattaatgggatggtgacttaaagctatttctttgttcattctgtaccttctgttatgttgaaagggataacattaattaaggaataaaaacaaaagacgtagcgatcctctcttttttataacaataattacttgagggatctctcaaatatacgaagctaaaccacaaaaatagatagattgcctaacaaatcacaacttaatagtttaattaaacaattttaaaacataatctaatattatataaataaatagatttaacgttttctacggtaatactgacagctttcaatagctaaataaagctgataaaaagcaaaccaataaaaaaacataatagctaaattaattaacaatttattttataatctgatttagctatttaattctagtatgaaaaatttatttttcttaattttatagtaataaaaaaaacagtatctttattttaaaaatactgtttttattttaatttttgacgtgatattacttaatttttattctgatggcgtgatttccatttgccccgcaatccctttatccgcattttcgagtatttggctataataaacaaaagggaaatgggaataagaaggctgttttagctcaactaataattcactctgtttttcgatccacactgtatctttccaaccaaaatcagcaggcgctggtttttgtccatcatgattaatcactttaaaacgtgcaccttcaatatgaaaaggttgtggtgtttccactgtcactaaccaacgttcccagccattttgtttaccgacaagatcgatccttgataactcccaacgcgcattattaataccaggaggactgttttgtaattggatcgttctcggttgaattgaggtggtaatttgtgtgtcatccaccaccaactgttgtggaactttatcggtaaccagtgacatcagtccagtaggcttgatggttagcacattggtattgcgcaataagttagaaggttcaaaaataccacgtaatctatccataaatccggcactttgcccagcagtgatagtcacttcttcgccttctgatagatcaataagaatttcacgtcgctcacccggtgccataggaatagatttcaattctaccggtgacgttaacaaaccttgatcagaggctatcagatagagtgagcgaccatcattcgccgataactcataacgtcgagcattcgaggcattaactaagcgtaaacgaatccaacctcttgatacttcaatataaggatcttcacagccattcactaataatgtgtcaccataaaatccctctgtcgcggcttctttgtcgtactgtggcgttccaaagttatcaaggcgtttatcttgaagaataataggaaagtcatttaccccataatgtttaggcaatggtaacgatttgctctcttcgtcttcaacaatccacatgcctaccaatccgttatagacatgaggcgccattttaaaaggcgtattcgcatgataccagcaggtggccgctttttgacgaataggcaacaccggtgaccaataggctcccggagacatcatccttgcagctccacctatttgtgttcccggaactaataagccacttacggtcatagaaacgggttcattaaggcgattgctataaatcagtttgacatcatcaccgctttttactttgattgtcggacccggcattgagccattaatgccccagacttctgttttttgtgtgccatcaaaggcccaatgcactttttgtaacgttacaaaaagaggctgaccattacgtgattcaagtaatgggggaataggtagttttctatcactaactgatcctgcacgaacagatgaagataatgagcccagacataccgctaagcctgaagcctgtaaaaactggcgacgactaaatgacatactttctccgcaacaaaatacccatattcctatcccacgagtgaggatcaactgataggaaaaaagctgctgtgatatttaaagacaaaagacttaaatcaaattatgacagcataataacgcggatatgacataaatcctaaaaatagttgataacttagtgcattttaatttattaaagacaatatccgtccgaaaatcgggatatattcaaacgatcaatcaacctataacgtttattgttagccattataaagtatataattaaaccattaaaatcatgatgttataaaaatgccaaatctaatcgatttggcattaggtatgataaacaattaaataaattacagaccgttaatttaacttacctgcaaaatcgcgtttattcatttcttccacttctttatcaagctcttcaattttagccttcatgatctgacgacaatcttcagctaattctctcacctgatctttgttatattttgatacatcaatgggaggcaacatttcaacaatcacgtagccattattccagcgatttaattttatcttaccttgtgtggtagagacacaaacaggcacaataggcacccccgcttgcatcgccgcgtgaaaagcccctgttttaaaaggtaataaaccacgtcctcggctacgtgttccttcaggaaacatccatacagagatttttttcgctttgatttgctctgcaacctgagtgatggtgctatgggctttagagcgattacctctatcaatcaaaatattgccagtgatccaataaagctgtccaaagaaaggaataaacaccaagctttttttgcccaccgtcacggtattaggttgtaccgcattcgacattgtcaccatatcaaagttattttgatggttaccaatatagatactgggtccataacttttagcttctttaggaaaacgctcaactaatttgatcccaaagacatgtgataatttgccgaataaacgtccataagtcattacgtgtttcggatttctgggagaaaacatgcaatagatcatcccaaaagtcaccacaataatggtgtacagaatgacaataatgcctcgaataatggctagcataagcttttagcgtcctaataataagtgggtcatatgacccactaatctacattgaaagttaaaattaatgagtttcgatatctatatgatcgatactttgtgcaccacgagggagcgaggttccacgacgaccacgtttggctttaaatgtctgtaattcattcatcgacatcgtgagtttacgtttaccaaaatgcaatgtaacactggcattttctggtaatacccgcaaccaagcgactttatcttcaccacttgcagcctgtgaagcaggaatagaaaccatttggttaccttttccttttaccatagttggcaactcagaggcttcaaaaatcagcattcgcccaccctgagtaatgatcatgatcaaatcactcaattcatcatttaagcgttgaggtggtaatggtaatgcattttcaggtaatgttaataatgatttaccagctctatttttagaggttaagtcatcaatactacagataaacccataaccagcgtcggatgccattaagatcttatcgctactttcccccatcactacatgacgtaattgagcccctttttggacttttaatcgtccagttaaatcatcacctttactacggcctgatggtaatgcgtcaacatcaacagtataactttgacccgtggtatcaatcagatgtaccgcttgattgctcattccttcaactgcgtcaaaataatcatcccctgttttaaagcccactgatttcgcatcaatgttatggcctttttggcaacggataagccctttttcggacatgatcacggtaaccgcttcagggtgaagatgttttaatgggataggctcatcgccaacatcaccactaaaatagctaatctcttctgcttttaatgtttgttgttgaccatcaacagtaaatgtgagggcttcattttttgctattaacacgatttgttcgataacatcactttgctctttgcctaatgcaactaagcgagtgcctcgacctttcttattcatctcatttagatgttctgcagatatcgccagaatacgtgttttatcggtgataataactaaccaatgttgattgtttttcttttctgcatcgactaagaaaggcgctagcaattctgtttcatctgaaaccgttaacagccctttaccggttttattttttgtctccatctcttcataactgagtacagagccataaccctcttttgttgccagtaaatactcctgtttagcggctcccgctaacatatattttacgctggcgtcaggtgggaaggtcaatttaccggttaaaggctcaccttggctacggcctgatggcatgtcattgggacttaaactatagcttctacccgttgaatcaaggaacaatactggctggttgctcataccccgtaccgcactatgataactgtctccggcacgataactcatggtactaggatcaatttcgtgccctttcgcactacgcacccatcccatttcagaaagcacaatagtcacaggctctgatggcaacatatcttgttcattaaccactttcgcctcttcttgaggtcgaataggagaacgtcgttcatcaccaaactctttagcgtctgcctctatctcttttttcaataacgtattgagacggcgaggagaatttaacagtttttcaatactgtcgcgctctttttccagttcatcactttcagcttgcagttttatctcttcaagcttagctaagtgacgtaaacgtaactctaaaatcgcttctgcttgaatatctgataatgcaaaacgacgcattaattccgcttttggctcatcttcataacggatgatctcaatcacttcatcaatattgagataagcgattaataaaccttttagaatttctaaacggcgtaatactttttctaagcgatggtttaaacgattggttacggtttgacggcgataaactaaccactcatttaaaatggttaatagccctttcacagcaggacggttatctaacccaatcatattgaggttaacgcgataacttttctctaagtctgtatttacaaataagtaatacatgacttgttctaaatcgacgcgattactacgaggaacaatcaccaatcgagtaggattttcatgatctgactcatcacgtaaatcatcaactaaaggcaattttttcgctcgcattaatgcagcaatttgttcaagtaccttagcaccagagacttgatgagggagagctgttatcaccgcacaaccctcttctttttgccaaacagcacgcattctaatagaaccacgtcctgttttataaatctttttgatatcctcaggagcggtgatcacttccgcttctgttggataatcaggtccttgtacatattgcataacatcagataacccagcatcaggattatctaatagcatggttaatgcttggccgatttcccgcgcattatgtggcggaatatccgttgccataccgacagcaatccccgttgtcccatttaataaaatattaggtaaacgagcaggcaacatttttggctcttgcagggtgccatcaaaattggggatccaatcaacagtaccatgtcccaattcgcttagcaggatctgtgaatatttagataagcgagactcggtataacgcatagctgcgaaagattttggatcatccggagccccccagttaccttgcccatcaattaatggataacgataagagaagggttgcgccatcaataccatggcttcataacaggcgctatcaccgtggggatgatatttacctaatacatcccccactgttcgtgctgattttttaaatttagcactgctgtttaaacctaattcagacatcgcatagacgatacgacgctgtactggctttaacccatcgccaataaaaggcaatgcacgatccataatcacgtacattgaataattgagataggcattttccgtaaataagtggagcggttggcgctctacaccatcatgagtcagttcactcattcaatattttcctcagacgcttggtgagttccattacacttcgatgtcaacttcgtcgcctttttcttgcaaccagttacggcgatcttcagaacgttttttggcaagtaacatatccatcatgcccaacgtttcttgataattttcatcatcaatcaccaattgcactaaacgacgtgtattaggatcaagcgttgtctcacgtaattgcagtggattcatctcacctaagcctttaaagcgttgcacatttggcttaccttttttacggctaaggcgttgcaaaatagcgttcttttctgcttcatcaagggcataactcacttctttacctaaatcgatacgataaagaggtggcatagccatatagacatgaccttgctttactaatgccgggaaatgacgaacaaataaagcacaaagcaaagtggcgatatgtaaaccatcggagtccgcatccgcaaggatacaaatttttccgtaacgtaattggcttaaatcatcactatcaggatccatcccgatcgccacagaaatatcatgcacttcttgtgacgctaatacttcatcagaagagacttcccaagtattaagaattttaccacgtagaggcataatcgcttgatattcacgatcgcgagcttgtttagcagagccacccgctgagtccccttcaactaagaagagttcggtataacgtaaatcttgcgaagtacaatctgctaatttacccggcaatgcaggccccgaagtcagtttttttctcaccacttttttagccgcacgcatacgtcgttgcgcactgctaatagccatttctgcgagtaattcaccgacttgaacgttttggtttaaccataaactaaatgcattttttactgcactagcaacaaaggcactggtttgacgtgacgatagacgctctttggtttgtcctgcaaattgaggatcttgcatttttactgataacacataagcacaacgctcccatgtatcatctgcggttaatttaatgcctcttggcaataaattatggaattcacaaaactcgcgcatggcatctaatacaccttggcgcaaaccattaacgtgtgtaccaccttgtacggttggaatgaggttcacataactttctgtgagtaaatcaccgccttccggcaaccaaagcattgaccattcaacggcttcgttatcaccttcaaatttccctgtaaatggctcttcaggcaggcgaacaaattcagcgacagcttcacttaaatagtcagttaaaccatcagcgtaacaccacgtttcttgggtattattgactttatcggtaaaagagacattgacgcctgggcacaacaccgctttggcttttaatacatgagataagctttttgatgagaaacgaggaatatcaaagtaagtgctatccggccagaaatgaacactggttcctgtatctcgtttagcacacgtacctatttgatgtagctcttcaactttatcaccgttctcaaaagcaatttgatatattttgccttctcggcgcacggtgacttcaatacgctttgataacgcattaaccactgagatcccgacaccatgcaagccaccagagtattggtagtttttattggagaattttcctccggcatgaagatgggcaaggatcagctcaatagcagagactttcagttctggatggatatcaaccggcattcctcgcccattgtcgataacctcaatagattggtctgcatataagataacttcgaccttggttgcatgccccgcaagcgcctcgtccacgctattatctatcacttcctgtgccaaatggttcggtctagtggtatcggtatacataccaggacgccgacgtacaggctctagaccattaagaacctcaatatcctttgcattataacttgattgagtcattgttttaatctgcggttcactgtttgagaatactgtttataataacaggtgttagcggtaatatgatattcatttttgaattgagacatcaaccccagtattgcaggttaatgagtcgaaaacgatgttattttcaaaaactgaacaatttccgggaaaaaacgttcaaaattaacaaaagcatggtttcctccctgctctactgtttgcttacaagcgccaagatatgaaaccgcttgacgataatcaagtatttcatctccagtttgttgaagcaaccaaataagatcgggggaagttatcgtaggaatacgtaaggcaagtaactcatccatatggtgaggtgctaatctatacttttgatgagtataaggattttcattatcgcctaaaaaatcctgtagcaaatcaaacgggcgaaccgcaggattcaccaccactgcaggtaaatgaaaacgttgtgataaccaaatagcaagatagccccccagcgacgagccaattaatcctaacttatcattggcattatcttttactaatttttcaattaattgagcggcttgctgaggataagggggtaattggggtacaagtagctcaatatcaggatgagtgactgataaccattgtttaaacccttgcgccttggctgattgaggcgagctattaaaaccatgtaaatagaggatacgagacatgacttaatagccatccgcgtcaagatctggacaaaaatctttacccgctagacgatgtacttgagtatcaatattcctcttaccctgtgcagataatgataactccaaatagcgccaacctggcgaaacggtatctaaagaaaaattagtacaatgcgggcgaaactgaatacaggtagagggtgttgctaataagcgaataccattccacatttcatccatttcttgatgaatatgaccacatagcatcatttttatttgagggtgatctttaacacgctcagctaactggtgagagtttcttaaactatgttgatctaaccaagtacagccagaaggcatcggatgatgatgcaataagatcacagtatctctttctttgtggctttctagacagcgtgttagccaatctaactgacagtcagataactcgccatggggaacaccttgaatttggctatctaataataacaattgccaatgttcaccaattaacacttgttttgccgacagaatgcctgcctgatttaaagcatcaatcattgctggttgataatcatgattaccgggtaaccacacacaaggtgaaggtaatcttgcaatcccatcagcaaaatgctgataagctgcaaaggattgatcttgaactaaatccccagtagcaacaatcaaatcaatcgataacccttgctgtttaatcgcgtccaataccgcatgatagctacgataggtattaattcccaacaaggtatcatccacattagcaaaaaggtgggtatctgtgatttgtaatattctaacggtgtgttgttgatccaccgacaattcaagctggctttccaaaaggtttccttgtttctctcttactagccgttattttaacgtaattttgtattaaagatctgccacccaatacacatttcaaaagattattgagaaatattctcgctaccagtcacattttttatctcttatgttcaagcttaatcgattgtatattcatatactttaaagataattacgtcatttatcatatcttttcatagtgacgaataaagtttcttttggcaattatcacaaccaatcttttcttaaggtgacatgatgaagctgtaaccactgaagtgcgatgacggaagcggcattatcaattatcccttcttcaacccattgataagcctgctctcggctgacgacatgaacacgaatatcttcattttcacaagctagcccatgtatgcctgttgctgttgtggcatccacttcccctacatagacatacatccgctcactggttcctccggggcttgaaaggtaacttacaatgggcttacaacgacctattgtgatccccgcttcttctgtggcttcccgtcttaccacctcttcagggctttctccttcttccaccatgccggcaatcacttctaataaccaaggtgtttgactggtttcataagctggaatacgaatttgttcgattaatacaacttcgtctcgtttaggatcataagccaataaaacacccgcatgaccacgttcgaacacttctcgcttaacttcggcactccatcctcccttaaataaacggtgtttgaaacgatactcgttcatacggaaaaagcctttatagagtgtttttttacttatcagctcaacatcattacgtgtatataaaaatggtgtattttcctttttgttcatacaatattcctctggttatacttaagtctttttttattgcatacgtttaatacagatttaaagatatttgcccgcaaatcctgtaaagttaacctaaaataaaaggatatggcacaaatggctacccctacttagggaaacaatctgctagaattgtttctatacaagattaacagaggcaactcagcgaaactgttgcaacaaggaattaaaatgaaaaaactgctctctcttttagtcacgatgagtttggcagggttcagcactgcaagtcaggctgaggatctgctacaagtttatcaaaaagcaaaggacagtaacccagaattacgtaagtcattagctgaacgcaatcaagcttttgagaaaatcaatgaggcacgtagcccattattaccacaattaggattaggcgcttctattgattataaaagtggctatcgtgatgctaaaaataccgagtctaactctcttggtgcgaatttaacgctgactcagactatttttgatatgtctttatggcgtcaattgaccatgcaagaaaaaacggcgggtatgagtgatgttacctatcaaacaagccaacaacagcttattttagataccgcaacagcttattttaatgttctgcgtgccattgactccttatcatttattgaagcacaaaaagagcaggtttatcgccaattagatcaaactacacagcgttttaatgtagggcttgttgcgattactgacgtacaaaatgcgcgtgcaaactacgacagcgtgttggcacaagaagtggctggacgtaatgaactggataacgcattagaaaaactgcgccaagtcagcggtgtgtattatattaatctggcttcacttaatatcgcacgtttttccaccactccaccagacgccattgataaactgttaaaagacgcagaagagcgtaacttaagtctactcagtgctcgtttaggtcaagatttagcacgtgaaaatattcgtttagcgcaatcaggccatttgccaaccgtaaatttaaatgcttcaacgggtgtctcaaacagtcataatcatggtagtgctttaccaccagaaacacctgctaacagccgtaatagctataatggtcaaagcagcatcggactctctttaagcattccattatatacaggtggcagaacgagctcacaagtagaacaagctcaatatggctttaccagtgccagtgagcagttagaatcggtataccgctctatcgtacaaattgcacgttcttcttataacaatatttcagcctccatcagtagcattaaggcctatcaacaagtggttgtgtcagcgcaaagctctttagatgcaactgaagctggctatcaagtgggtactcgtactattgttgatgtcttaaatgcgaccacaacgctttatgatgctaaacaaaaattatcaagtgcacgttacgactatttgattaaccaattaaatattcaatatgcacgtggtaccttaaacgaaaatgacttaattcagttaaataatgcgttgggtgaagagatttctacttcccctgacaacattattcgtccattaacaagtcccgtactgaatacgacaaattaatcgttaatagacaccgttaaccatcaaaaccgcttacagtgatatacgggtaagcggtttttttatacactagcgagaaaaaacatttttggttacaaatagattaaaaataaattcacctaatgcccattacttaagtttataaataacccaatcattatttgtttaataaatagaggatttagctgatttcattgccattatccctatgaagatcacaaatttctgctaatcgctgatgattaggtgtttcttatttattttctaacctatttaacctatcctagcttttattttgaacgttttactttttatggatcttaccaatatgacaatgaaacgtaccaaatcgattaatcgcgatgcttttcgtaaagcatttcgcccttatcgtctggcgcctgttgccatcgccatcaccgcggtattcgccctttcagggtgtgaagagagtgatgagacggtttcactgtatatgaatgcacaagaatgtgcgcaagcgaatccatcacaagcagcacaatgtgaagattcttaccgcacggcattacaagaagcgcaacgtactgcacctaaatacgcaacaatggaagattgtgttgctgaatttggtgatgcgcaatgtacacaaactgcctcaattgatggtaaccccgttaacaccgaaaacgccaataacctcaaccctgatagttcacaaatggcacaagctaactctggtggtagcttctttatgccactgatggcaggttatatgatggggcgtttaatgggtggtggcgcaccagcacagcctttatttagctcgcgtaatccaagcagcccagctaatggtaagtttgttgatgcaacgggtcgtaactatggtcctgctgtcggtggtcgtcaaatgaacgtccctaaaacagctatgactccaaaaccatctacaacatcaaccattacgcgtggtggctttggtaataccgtttcacgacaagcggcagctcaacgtgcaagcgcgacgaataacaaccgtagctcaacaggctcctcttcatatcgtgcaggtggttaattaaaccatgaaacgcgaacaaattattgaacgtcctgattggcgcgaaaaagccactgaatatggttttaacttccataccatgtatggcgagccttactggtgtgaagatgcttattatcaattctcaatggaagaagtggaaacattagaagaaaccacggaagagcttcatcagatgtgcttacaagtcgctgataaagtggctaatagtgaagagctattgactcgttttcaaattcctcgccattgctgggattttgtccgtgagtcatggaaaacctcgcaaccatcgctttattcacgtcttgatttagcttatgacggtaaggggccggcaaaattactcgaaaataatgccgacacaccaacttcattgtatgagtctgcttttttccagtggatctggcttgaagatcaaatcaatgcgggtcgtttgccacaaaatgccgatcaatttaatagtatccaagaaaaattgatcgacagattcgctcaattgcgtgatcaatatggtatgcgttatctgcacatgtcatgttgccaagatacgcaagaagatcgcggtaccgtacaatatttacaagattgtgcagaagaagccgaagtcactaccgatttcgtttttattgaagatattggtttaggtgaacggggtgagctgaccgatctacaagaccagatcatcagcaatatgtttaaactctatccttgggagtttatgttccgtgaagatttctcgaccaaacttgctgatgcagggatccgttggttagagccagcttggaaaagtattatttccaacaaatcgttactgccaatgctgtgggaaatgttccctaatcatcctaatttattaccggcttatttttatgacggtaaagcgccagattcattatcacgctatgtcatcaaaccgctcttttcacgagaaggggcgaatattcgtatcgttgaaaatggtaaagatatcgctgttgctgatggcccttacggtgaagaaggctttattgttcaggacttccatccactgccaaaatttggtgatagctatacattaattggtagctggctagttaacgaccaatctgcaggtatttgtattagagaagataaagagcttatcacgcaagatctgtctcgtttctatccacatattatcttagattaataacgcaattgctgtgatagcaaaacttattgtctagcattgaccccctccccgccctgagctaaagggcggggctttatggcacacctaaaaaataaatttaggcttaacattctatcaattagttttattgaatattttacccaatttgaaaggtcatcatgctaagtgatttattaataatatcattatttaataaagttactttttcatccggctgttttaaaccgagtagatataatgcaggtaaaaaatgttctgctgttgggtgtgcgagttgcccttcttgcgttgataaaatggtaaaaagcgcttcaggcactttatcactttgtaaacagcgctctactgtttcactaaaagataatgcccaagagtaaggctctgcttggtcattttgccaatccatcattcttaaattatgaacgatatttccactgccaatcactaatacaccttctctacgtagttcaaccagtttttttccaaactcatagtgccactgtggcgattggttagcatcaatacttaactgaacaacaggaatattagcattagggtacatcttctctaatattccccaactaccgtgatcgaatccccattgctccatatccagttttaatttcatcggatcaatcagatcttcaattaatgcaacgagaccaatggagccttttgcaggatattctatttggtataactctggtggaaatccataaaaatcatgaattgttttaggatgagtcatcgctgtaatataagtcccttgcgtataccaatgcgctgagatgactaatattgctttaggcttaggcagtgtctctcctaacgtcgtccagaggcgagtatatttattatcttccaatacattcattggactgccatgtccaacaaatagcgctggcatcaattttctgtccataatcacctcttatcatcttgctatctatggcatttagcatactgccttcttacttgaaatatagtcaaagaagtgtgaaatagttattcaaaaaatatgaaaaagccacttagggaaacttaagtggcttgaataagtgtgtgtgtgttttcagtgtcgttttaacttgttaatttcagcccgctttcttctcctcgcgaagacgataagccactaaatcttcaatcgttaacactggcatatcatgctgtttagcaaaagtgacaacttctggcgctctggccatggtgccatcgtcattggttaattcacataacacggcaacaggtttaaaacccgctaacgttgctaaatcaatagaagcttcagtatgtccaccacgtgttaatacaccaccaggttgtgctcgtaatgggaatacgtgacctggacgatttaaatcacttggttttgcattatcagcagcagctgcacgtactgtcgttaaacggtctgctgctgaaactcccgtagtcaccccttgggccgcttcaatagttaccgtaaatgcggtatgaaaatgactggtgttattttctaccatcataggtaaatcgagttgttgacggcgctcttcggtaatacagacacacacaataccactgccatgacgaatagacatcgccatttgttctgtggtcatggtttctgcgacaaataccatatcgccttcattttcacggttctcatcatcaagcaccatcacacctttaccggcacgaagggcttcaagcgcacgctcaacacgctctaatggagagccaaattcggaaagtagcgtctgattcatggtaaaaaaacctcaataattaatgaaagttaccagaaccagggcagtcttaggagtggatctctgctgtataaatagacaagcagaaacaacaggaatggatacaaggatcccactgatgctattttattctctcccatccagactttaactgtcggctccagaattacactggatctgctgacctttgcatcacattggtaatacaaagcgctcgcgggctttacctgattattcaggtatctaccgccggtggggactttcaccccgccctgagataaacagagaaactatacgctttaaaataataagaggcaatcccaatccacaataacccttgtcaaatcacactaatctgttattgataggcaaataatttaacgatttatcataaaaatataacaataatatcgatatcaggttttattcccacagccctcatattacacttagcatagctttctattttattgtgaggactatccatgctggacccaaaaaaaattgaacaagtcgctcgccaaatccaaaatgtactaccacaaggtatcaaagatttaggtgatgatattgataagaaaatccgtgcaatacttcaatctcaattaaacaaattagatttggttaatcgcgaagaatttgatgtgcaaacacaagtgctgttacgtactcgcgaaaaattggctcgtttagagcaacgtttaaatgagttggaagcaggacaacaagcgccagcggaagttgcacagattgaagaagttgatgttattgttgaaactgggaatgacagtaaagcttagttgatagtgtaataacaccctgtgccacattcggacagggtgttttctcaaaaataactttcatttgttaataaattctcttagttcggctattgtttgttctattttatcttcaaaatcaatatcgaggatattaaaaaaagcttcgtaaccaatatctttaattactgttttacagtaatatttacttttacaattatcaaccccgattgaaggtaaattaaatctattattttcttcagtatattttctaaaaaactcatcttctatatctaaaaatggactatataagatattatctccagatactttacctcgagagtcaccatctaaaaaagaaatcatatgtttactttcacaaataaagttttcccgcttatttcttctcataaaatctataacatttgaagcaccacctatataaataatctttactgatttatttgtatcaattttagaaattaatctttttaaataaatttccaacattatatcttctgttagaatatatttatcataatctttaaaaccaaaaagctcacccacaatataactatatgagacttctctcataattagcctggaattaatattctctaaataaaatatagactcaccaacctgttgatataacactctcataataggaagagaatgtgttgtaaatattatttttttcttatatttatcacacaaattattgagggcttgtattaatctaacttgagcagaggcatcaagagaaatatcaatttcatctacaacaattaatttacaatcagaagttactgtcttatatagatttattacaaagtactctccagagctaaaataatcctctctaatatatctatatccatcaagaggaagaaaataatacttattacctcttattattacctctttgagtgatgagaatctctctcctatatagatttggctcaaaaaataaattatttctatatttttattaaactctcccttaatataactctctcttaattctttatcaatattacctaaaacaggaaaattagagaaacgttttccataaggaatagggagttcaacatttaaaaaactttcatcaataatatcttttgaatcaatttctccgttattacaataataatgataattgtttttatttatagatattgttatattagtttctttatttatactgaaaattgaagatgtcttatttaagacacttatatcttttaataagcataatgattttactatagatgttttccctattccattccggccagttatacaaattaaattcctattggaaaaatcgaaatctaataaaacattattaatgtgttgtaatgatttaatgtttagtgatataaacatcacaaatcacctttatttttaattaatttattaattattgaattaccatatttacgtcttagcttatttatataaactggatcaacacctaatgcataagataattttccagctaaagaaaatattgcactcatttcatccatttctgaaaacttgacaaatttatctttattattaataagaaaaaatattttaacttctatctctttttttaactgacgacttatcgaaagagttcctacaggagaaatgcttatacctaatatattcctttcaaatttttttgttattatttttgtttttttatcatttaaatgaaatacattatcctgattataattcaatatattattaatctcttggttaattgaattcttatctaagttatttttacctgataaaataatatcatccgcatatcttgtatatattaaatcgttatttttagcaaaacaatctattttacaatcaatatcatacataacaaaattacttatagctggtgatgacgaaaaacctataggtagttttttatctatagtaactaactctaatattctagataaatgaaccattacatcatttgtatctaaaaaagaaatatcttttactttttctattattttattttttattaagtcatagcctatagatggaaaaaaattttcaatatctgttttatatatataattattaaacctatgaggagaaatacaatctactacattaactccttttcgataagagtaaactaaatcttttctaaactctatattttcaaaaataaatttagataaaaatagttgaattgtttttaattcatcactgattgaataacattttttattattaaaattaaattctttaatatgatcatttaaagataatgtataaaattgttcgaaactctcttttccattaaaataaaaattaaagacttcctctaatttcatattctttccccctatatattagaaagggtgaagaatctctcttcaccctttctaatatatttatactgcctttagggactccctttatgactggagataactcgctagtcaggagtatggttatattatagccatttccaacataaacggcaagtacatccaacaaaagcactcattagagtgccctttcaattataataaacagcttaattatttctttttaatggcattaataatattagttgtggaaataccatcttcaaaattaagtactttcacttcaccacccgcagcccacacctctttactgccagcaatgtcttcgggtttataatcgccaccttttactaaaatatcaggcaatactgatgcaattaaacgctgtggggtatcttcttcaaacgcgacaacccaatcaaccgcccctaacgcgcctaatacggtcattcgttgctctaatgggtttactgggcgactctcaccttttaagcgtttagttgatgcatcactatttaccgcaacaatcaggcgatcacccaatttacgtgcattagctaaataactaacatgtccagcatgaagaatatcaaaacaaccatttgtcatcactatgcgctcaccacgttgacgcgctaaagcaaccgcttgtttgagttgtgactcttccataataccaaagccgttatcagcacgcccgcgaatagcattttcaagctcaataggagaaaccgttgacgttcccagtttccccacaaccacaccagccgcagcgttggcaagaaagcacgcttccgctaatggtttgcctgcagctaacgcagtggcaagcacaccgataaccgtatctcccgcccctgtcacatcataaacttcttgtgcttgagtgggtaaatgcaatggcgcttcattggcttgtaataaactcatgccccgctctgaacgagtgatcaatagtgcatcaagtgctaaatcttttactagttgagtgcccttttctactagctcatcatctgtatgacaaacgcccaccacttgctcaaactctgacatattcggtgttaatagtgtggcaccacggtagcgttcaaaatcactgcctttaggatcgattagtaccggcacacctgcttttttagctaattggatcatttgctgtacgtgagaaagtgcacctttagcataatccgataaaattaaggcacccattgagggtaatgcttgttgaatacgctcataaattggctctggagagacattgctaaatccctcttcaaaatcaaggcggataagttgttggttacgtgataggacacgtaatttagtaatagttggatgtgtcgcaatagagacgaaatcacaacgcacattaacctgacttaatgtattgcttaatgcttttgccgcttcatcgatgccggttaaccccaccaaacgagaattagcccctaaagaagcaatattcattgcaacgttagctgcaccacccggacgctcttctatggtatctacttttaccacaggcacaggtgcttctggtgagatccgacttgtaggaccataccaataacggtctaacatgacgtcaccgacaaccagcacattggctttattaaaatccggcagcgttactttcatcccatactccacattattttcaaaaataagccgaaataataccataacttgttacgcaaaaagcgaaactcatcagaatagtgtgaacaaaaaagagcgtttattcatctaaccatttttgtttactactcaatacccattgccgttctgtaataaaacaatctccatcaacaaccgcaggtaatgtttgtaatgcaagatgatgaagctcattacgtagggtgacataagcttgagttaataactgagcctcttgttcactcatcacttggtattttgccattaattccaaaattcgcacattatcagaccaacgggtcaaagccggatattgatgtgaaaagcgcaataccaaatattgtgcgataaactcaatatcagtgatcccccctgatgaggcttttaaatcaaatgtattgctttgagtgggtgccaaatgctgtaccattttttggcgcatctcacgcacttcctgctgcaatacagttgcgttacgtgctaaacataatgtttcatggcgagtacgtgcaaacatctgctgtaattggtcatcgccataaatcattcttgcacgaattaatgcttgatgctcccaagtccaagcttcatttttctgatactcatcaaaggcttgaatagtacttaccaacatacctgattcaccggaaggacgtaagcgtgcatctacttcatataacacgccggaagaggttctggtgctaaatagatgaataatacgctgcgctaaacgtaaatagaattggcgagcatcaatctgttttgcccccgttgtcagaatattcattgggcaatctaataaaaaaaccaaatctaaatcagaactataccctaattcccagccccctaatttgccatacccaacgaccgcaaaacctaaaccgtctcgttgcgctaaatgcgcaggttccccatagcgtttcaccatataggaccatgcttggtgaacaacggcatggataatggcttccgctaaataggttaggtgatcgctgactttcatcaccggtaatactcctgcaatatcctctgcggcaatacgcaatagctgggcttgtttaaattggcgtaatgcttctaaacgttgctcttcatcttcttctggcacacgcaataaatattgacgtaattcgtcctgataggcatttaatggtaatggttgatagagggaatgaggatcgagtaattcatccaataataatggatgtcgtgttaattgttcagcaatcatcggtgatgcagcacataagcgcactacgtgggttaatacttcatcagactcttgcattaactctagataagtggttcgacttacaatgcccaatagcaacggggtgatacgctgtaagatcaccaacgcttgtggttgaaggcacactttagccaataacttaggcattagcgcatcaagcacatcacgccctctaggccctatagtacgtttactgatatcttggcgaaacagttgcagtgtttgacaaatagcttgcctatcttctgccgttagcccttgatgaaaaagcgttgcgctatcaggtaaacgccctaataaccataatcgcttaaattcgctgacatcttcttcatcttcattttcatcatcttcgccaatcagttgcgtaaaaataacggaaacagcctgcattttttggttaatttgttgatagagcatttgccaatcgtcaaatcccatcgcaaacgccagtcgtgccttatcttcaagattgtcaggtaacgtttgtgtttgttgatccgcaatagattgaagaagattttctaatcgacgtaagaaaagatagctatctgctaactgtgatgtttcttgtgcagagagtaattccaatttagcaatgacattaagcaccgttaatagtgaatgactttgtagctcaggctctctaccgcctcgaattaattgaaaaacctgagtaataaattcaatttcacgtatcccccccgccccaagctttatattatcaatcatccctcgacgacgtacttcacgacttatcatcgatttcatattacgaagagattggatcacactaaaatcgatatagcgacgataaacgaaagggcgcaacatttggcgtaagatttggcaatactcttttttttctgcccccaaaacacgcgcttttaccattgcatagcgctcccaatcacgtccttgctcttgataataatcttcaagcgcggcaaagctcatcactaaagggccactttcgccaaaaggacgtaaacgcatatctacacgataaacaaaaccatccattgtatgttgatctaacactttaatcagtttttgccctaatcgggtaaaaaactgagcattatctaattcacgtcgcccaccttgagtcacaccattttcaggataggcaaaaataagatcgatatcagaagagaaattcagttcaagtccacctaacttgcccattcccaaaataagtaatggctgaggttttccctctctatcacaaggcgttccccactgttggcaacattgctgatatagcttatctttggcgacactaatcaaggtttccgcgagtacactcaattgcttgagcgtacagggtgtatcacagagttggaaaaattgtgaccaggcaatacgcactaattgttgatgacggaactgtcgtaaaatggccatcaagtcatcttcattatcaacatgagtgagttgttgctttaattgagatgagtaattttgccactcatcactaacaggtggtgtttgtctgatttccgttaaccagtgaggattgacacgtaaatgctcggttgcaaaagggctaaaggcaaaaaattgctgctctcgctcactaaaaggggcaagctcgttgagctttgtagaaaacgtgcattgtgctttatcccataattgttgaaacacactgttagcagacataataaactctcaattgtcagaaaattaagcgatagccagcaaccacgccattgcagataatttaaaattcagccataacacatgataataatccgttgcgcgggtaaaggataacaacgaaagattatcgagtgcttgctgcattgattcaggtaactgaggctgctttttacaccaatcagaaaacagtgctaacatagcgggcatagtgagtgttggtggcgtcggattagcaaaaatagcttcttctaacgcttgaatagccgctaaccacttagtcagttgttccgctattgtgtcattaggtgcaagattgaccacacttaacgataatgcgggcttatctttagcaagataataaccacgggcagctttactgcgtgaagcaagtcgtaatcccccttgttcacctaaaaaagtcgccaaagcaatcacatccgccacttggcctttttttagctccagttcaaactcttcaataggtaattcatattgcgctgtacgaatagtgcctttatctagcaccacttcaatttgactctctaaataatccaccagccaaatttcacgatgaaaatcggtatgaaaaagaacctttaattgtgcttgtaatgccgttaaatcggtcttatccggccaaatttctgcgggaaaacgggttaaatcgagggttggctcatttaatgtcacattatattctgggcgttgatgtaaccccgcaactactttacccgctgttttaattgtcatttcataatgagagtcaatgccacggatacgtagccccatgtcccaattacgcatctgattatcggaggtttcaaagtaaagattagtcaatttatgcggtggtgtatgctggtatggcaaagtcagaatgcgctgaataatctgaggaatagcggcaggtatcgcactaagtttgagttcggtttctaattggctcattctatttcccttaagtaaatcaatcgattagtaaaatatttaacgcattgttatttcgcaaatggtagtctattcacaataatgaataaaaggcagattacccctatattctatcagttaagactgttctcattctggtttactatttgcttacgcaaactttactctttagtatcagtaaaaatattctcttgtatagataaaaaagttgaaaacataatgcgaaaattacctttactttttctttccttacttggcttaggcgtttctctgagctcacacgcagaaactcgttatgtttccgatgaattatccacctatgttcacagtggccctggtaatcaataccgtattgttggctcattaagttcaggggcaacagttacggtactttctcgtaatgccgctacaggttatgtgcaaatcaaagacgataaagatcggacagtttggttaccagaaaatcaattaagtacacaaccgagtatgcgcactcgcattccggctatggaaaaagagatccaaaccctacgcgataaattagcgaatatcgaccaaagctggaaccagcgcacaattgacatgcaaaataaagtgtcaaacagcgatgaaattatcaatggtttgaaaaaagaaaatgagcagatgagaacaaaattagcggttgctgagaaaaaactcgattttgctaatcaacaattagatgataggcagcgtgatatcatcctacagtggtttatgtatggtggtggtgttgccggtgctggtcttattttgggtttaatattgccacatattattcctcgtcgccgtaagcgtaatgaccgttggatgaattaatcacaggcaattaaggatcaagatcccgtgaaaatctaccttgttggtggtgctgtgcgcgaccaactattaaatttaccggtaaaagacagagattgggtagtggttggcgcaacgccagagacactattacaacaaggctaccaacaagtgggtaaagattttccggtttttcttcaccctgatactcacgaggagtacgctttagcgcgtaccgaacgaaaatcaggctcaggttacacgggatttacctgctatgcagcccctgatgtgaccttagaagatgatttgcaacggcgtgatttaaccattaacgccattgcttactctgctaaaggtgaatatatcgatccctatcatggtattgatgatattcatgccaaattactgcgccatgtttctgatgcatttagtgaagatccattaagggtactacgtgtcgctcgttttgcggctcgttttgcccctttaggttttacaatagcgccggagacgatgtcattgatgcaagagatgacaaacagcggtgaattaaatgccctcacggctgaacgagtgtggaaagaaacggaaaaagcacttcacagccaagccccacaagtctattttgagatcttacatcaatgtggcgctctaaaaatacttttccctgaaattaatgcgctctttggcgttcctgcccctaaaaagtggcatcctgagattgatacgggtatccataccatgatggtattagctatggtcagccggttgactgacgatatcgcggtacgttttagcgcgctttgtcatgatcttggtaaaggtgttaccccggtagaaaattggcctcaccatcacggacatggccctacgggtgttcctttagttgaggctctgtgccaacgttatcgtattcctaaccagatacgtgatctcgccaaactggcagccaaatatcacgatcatctccaccgcatagaaagaatgcgcccctcaaaaataattcgacttttcgatgcgattgatgcttggcgcaaaccagaacgcatcgatcaactcgctataattagcgaggccgatgcaaggggacgccaaggatcagaaaatttgccttatccccaaggagtattttttcgtcaagcctttaagattgccaatcaagttgatgttaaatcaattgtcagtcgtggtttaaaaggcagtgccatacgagaagcattaactaaacaaagagaagtcgcgataatagaatggaaatcgcgactttaactattgtgtgtggcaaatattaagcgtaacgctcaataatcaccccgacgttggcggcttgtgctatcgcccctggtttagctaattttattttgactcgtggtacagaaaactgagttatcagtagctgtgccacttcttcagcaacacgctcgactaattcaaaacgtcgcttttccacatactctattatggcgtgactgacactggcataatctaaacagtgagcaacatcatcggtttgggatgcgcgtttattatcccactccatttcgatatcgaacactaacttttgcttaatggttttttcccaatcataaacaccgattgtggttattactgataattgttcaataaatacgatatccatcacgtcatctcttattttttctgctcatcggataccacttccgatgaaatatgcgtattatccatacatgtctaacgaacgttcatcaacattggagaatacaaatgagtgctaacgcacttggaatgatcatcttcgcctatttgtgcggctcaatctccagcgcgattttgatttgccgactggcaagactccctgatccaagaaaatttggctctggtaatcctggcgccaccaatgtgctacgtattggtggtaaacttgcagcggcatctgtgcttatctgtgacgtcctaaaagggatgatccccgtttggctcgcctattacctaaatgtgcctcccttttatctcggtattgtcgcaatagcggcttgtctaggccatatttaccctgtttttttccactttaaaggcggaaaaggggttgctactgcatttggctctatcgctgctattggttgggatcttagcggactgattgcgggaacatggctactaactgttttactcagtggctattcctcactgggtgctattatcagtgcattgcttgccccattttatgtctggtggtttaaacccgaattcacttatcccgttgcactattatcatgcttagtactttaccgtcatcatgacaatattcaacgtttatggcgaggacaagagagtcgcatttggcataagctgaaaaaaaagacagagaaaacagataaagagataatccaagaagccaaagagcaagaaaaagaagattaacgcttatccttattaaaaaaaggtcatttattaactaagtgaccttttttatttaataattaaattctattataaaatataaataaattaaaaataatcacacataaaaaaaacaccctttttatattcgaaaaataaaaataataaacaacattattaataatacccttctatatttagattaaatatatcaatattggttttatttattacaaaaaaacattaaaaataaaaatcttaaataagataaacttatataaaaaatcaaaattaacgaaataaatcgcttgaaaaaaaaccaacttacatctattaattaataaccataaaaaaataatcatttaactctgtgaaacattggagttcaccatgctacaaaaaatatctgccaataaaattgcattaataaaaagaatgcaacttagtactcctacattagtcgatattctcgatagtttaggaaaaaccattgtattaaatagtcaattaaaaagtattaacctagaaaacttttattctgttggacaagcttatactgtgcaatggaaattaattagaaaacaaaaatctattttaaataaacaaccttctacgtgggaacaagttagttcttttttagtccctgaaataacagatgcaaaaggattattctatatagccggaggacatgaactaataacagaagcagcacttgcaggtggcatgagttgtacttattttgaaaaattaggctttgaaggagttattttagggggagcggtacgagacaagaaagatctcaccaatctaaccattccagtcattgccaccaatcttactcctacagatacacaaggcgcttattttgtcagtgagactggcactcaatgcaccattgagcatgccacaatctgtagtggtgatttagtgatatccgaccctaatggcaccgtgattatccctttttcactcgtcgataatgttctagaagaagcgattaagatagatagcattgaaaataacatgctagaaaaaatcaaacatggacaacgtttaccagaacttatcaatataacgggacgtatataataaataaaggtgactgaccatgataaatattcatacattgggtcctgcaggaacaaactgtgagaaagccgcttattattggctaaataaaaataatcaacaaggaaatattattcttcaccctacattagaaaccgcagtaaaagaaatggaggtaagccaaaatagtattctattaggttgtattgtttatccttttttacacaatattgtttttaataatctctcttttatcaaattaacagattgttttgttatggatacccataacatgctatttgctagccgatttaataatattaaggagataaaaaagttaggttctcatcccgcaccacaagatctatttagaaaaataacagaactcgataatattgaaagagttctttttaattcaaatagtgaagcagcacttcaatgtggtttagggcgagtagatggctgtattaccacacttagtgcagctaaaaaatatcatttaaatattttatatgattttggccctgtccctatgggattttctattcattcaaaattaaattaagtaattaattacatcacaacagtcaaaacgttaattatctagtcacttggttaataaaaaggaaaaaactatgagcttatatttatctagtgaaatgatctcttatgatatggatctaaatagaaacgaaggtgaagaaagtaaaattcaagctaaatttattcatggctctaattttacaatggcattttggacatttaaaactaatgccattattcctgaacataaacatgaacatgaaactgccacatccatactaaaaggctctttgaaactgacggtaaataaccgcattgtttatttacatgctggcgactcttttattattccctcatgggccgttcatcacgcaattgctttagagccttctgaggttattgatgtctatacccccgttagagaagactatgttgcaaggcaaaatggcgttattaaaacctatttagaaacatctcaaccccaaggataacaaaaagcgaggatcacctcgctttttctattcttactataatcgcaggagcactttctatgtttagtacctataatattgatgttttaacagaacaaaatcatcaatatttaccaatagaaaacaccctatcattacagaatatattttccatctcttggcacccatcattatggaaatctttacccgccaagcaactccctgaatacccagatatacatgccttaaattattgcaaagaaaagcttaagcattatcccccgctaattttagcttccgaaatcagagcatttaaaaatttattaaaacttgttgcaaatggtgaagcttttcttctgcaaggaggagactgtgcagaatcttttgatgattgccaagccactattatccgtgatttaacattcactttatcgcaaatgtccgcattaattgaacaatcaacgggattgccggtgattaaattaggtcgtatggctggacaatacgctaaacctcgtagccaagcatttgaaacacaaaatggcttaactttacccagctatcgaggagaaattattaatggtcttgatttttcagttaaaagtagagagccagatccgattagaatgataactgcctatcatcactcagcagcgaccttaaatctgttacgtgcgatgaattatacacaatataccaagcaacaatgggccttggatattaacgctcatcctggctctacagagcctgagcattatttccatttgctagaacaactctatcattcacaacaccatattattaataaacagcccgatacctcttcctattatgttagtcatgaagctttgttactgcattatgaggaatcgatgactcgtcaagattccattgacaacaaatggtataactgttcagcacatatggtttgggtaggagaacgaacaaccgatattgatcatgcccatatcgagtacctacgaggtattgaaaaccctatcggtataaaatgcagcaccagaatgtctggagaaaaactgattaagctaatagatactcttaacccgagcaatgaagttggaaaaattatcttaatcattcgcgtgggtaaagatgctattcatgcatatcttccggaattagtaagaacggtaaaagaacatcaacgagcggttatttggcaaatagatccaatgcatggcaatacacaatcagcaaatgacagtatgaaaacccgacatttcaatgatattgccgaagaaactcgtgcttttattcatattttacatgagatgggcatacaggctggggggatacatttagaaatgaccggacaagaagtcactgaatgtactggaggattacaacaaattcgatacactgacctaagtcatggttatcaaactttatgtgatcctcgtcttaaccggacacagtcattagagttagcgttcttggttggacggcattggcataattcactttaattgtaaccaaatataagtgcttagtacttaagccaagcacttatcattaccaacaccgccaatggctaattatttatccgctaaagcaggtaattcagctaaaggccaacgcggtctcactgtcacccctaaaggcccctcggtaccacctttaaaacggatcatccccgccaaagcaatcatggcaccattatcggtacataactcagggcgagcataaaacacttcccctccgagttgttccattatcattgccattttggcgcgtaaagtacggttagcacttacaccccccgccatcactaagcgtttaaagcctgtttgctctaatgctcgacgacattttattgccagagtatctactacggcatcttcaaaagcacgcgcaatatctgctcgagtttgctctgaatcatcgttttgacgaatagtattagcggcaaaggtttttaaaccagagaaactaaagtcgagtccgggtctgtctgtcatagggcgaggaaaaacaaaacgtccttctacaccttgttgtgccatttttgataaaacagggccgccgggataatcaagccccaatagcttggctgttttatcaaatgcttcaccggcagcatcatcaatagactcacctaacagggtatattccccaatccctgttacactaattaattgtgtatgcccccccgagacaagtaacgccacgaaaggaaaatctggcgttttctcttcaagcatcggcgctaataaatgcccttccatatggtgaactggaatagcaggcacatcccatgcaaacgccagagaacgaccaatagtcgcccccaccagcaatgcccctaccagccctggtcctgcagtataagcgaccgcatcaatatcttttgcagttaaatttgcttctttaagggcggcttggatcagtggcactgttttgcggatatgatctcgtgaagcaagctcgggaacaacaccaccatagtcggcgtgcagttttatttggctatagagttgattcgctaacagaccggctttatcatcgtaaattgcgataccggtttcatcgcaagatgtttcaatacctaaaactcgcatgacgcttccaaattcttcctcgcgcaatggcgtaatggatcgattgtagcattatttcactaatttaatacgctttcgccacaacttttacataccagtatgtgacaaatttctttttctggtctataattatccacctattttacatgatttaaatgtgtggttagcaactatcacgttgtgttttgaataaattaagacacaaaagtgagagtttgcgtttcaattttgtgcatctctttacaaagtgccctgctttgaagtaaaattccgcaccattttaaatgtcggctggctaaaatcatgccagcacaaaccgatttctattgaggtgagaggcacatgccggtaatcaaagtacgtgaaaacgagccatttgacgttgctcttcgtcgtttcaaacgctcttgcgaaaaagcaggcgtattagcagaagttcgtcgtcgtgaattttatgaaaaaccaacgactgagcgtaaacgcgctaaagcatcagcagtaaaacgtcacgctaaaaaattagctcgcgaaaacgcacgtcgtactcgtctgtactaatattttgcggctgataccgcaatttatgcagacactgtagtcgcagttaaaaggccgtgctttcttatgagagcgcggcttattctcgttcaacaacaggcgtaaaagggcttatggctggacgaattccacgttcatttatcaatgatttattagcacgaaccgatatcatcgatcttatcgacgctcgtgtgccgcttaaaaaacaaggcaaaaatcattcagcgtgttgtccgtttcataatgaaaaaacgccctcttttacagtaaatagcgacaaacagttttatcactgttttggttgcggtgcgcatggcaatgctattgattttttgatgaactacgacagacttgattttgtcgaaaccattgaagagttagcagcaatgcatgggttagaagttccttatgaatcaggaactggcagtagcccgattgagcgacatataagacaaaatctctatcaagtgatggagaaattgaatcagtattacaaaagcaccctcaatacccctgacgctcaggaagcaagaaattatcttgcgcatcgcgggctaagtgaagaggttattacccgcttttctatcggctttgtacctacgggttgggacaatatcctaaaacgttttgggcaaaatcccgataatcaagccctgttacttgaagcaggaatggtaataacaaacgataaaggtcgcacttatgaccgttttcgtcagcgcgttatgtttccgattagagacagacgaggtcgtgttattgcatttggtggacgtgtattaggtgatgatttacccaaatacttaaactccccagaaacagagattttccataaaggccgccaactttacgggctttatgaagcacaacacactcaccctaacccagctaagttattagtggttgaaggttatatggatgttgtggcattagcgcagtttggtattgattatgctgtcgcctcgttgggtacatcaacaaccgcagagcatatccagttgctgtttagaactacggataacgttatttgctgctatgatggtgatagagcaggacgagatgccgcatggcgagcattagaaactgcactgccttttttaaacgatggccgttctttacgttttatgtttttacctgaaggcgatgatcctgattcactggttcgccgcgaagggaaagaggcatttgaaaaacgaatggaacaagcacactctttatctgagtttttatttgattcgctggttccacaagtggatttgagcacccaagaaggcaatggcaaactctatagtttagcgcgcccattaattgatcagatcccaagtgagactttacgtctatatttattaagagagcttggaaatttaacgggaaatcccgatattgagcagatggatcgtttatttggtagaaactcgctacatcacgaaacatcgtatcaaccgacaaaactacgtactacaccaatgcgtattttaattgccttgttgatacaaaatcccgagttttgccaattagtgccaccgcttgaggggctaaatacagaaaaaatagcgggtttatcgctttttattgaattagtttctctttgccaagcgcagccaggcttgaatacaggtcagattatcgaactctatcgagagaataaattcggtaaacaacttgaaaaactggcgatgtggaacgatatagatatagatgagatagctgaaaaaacatttacagatacgttagatcatctctttttaaccgcaatggatgaacgtttaaacgccctcattgccaaagagagaactgaaggtctaacacaaaatgaacgcgaagaagtccaattgataatacaggctcgcgttaaaaagtaaaacctaaattaagattaaaaacacggcttaattgccgctatcggtaggtataaaaaataacctacatttgctacgctgaggggatcgtagcaatcgacaatgaaaatgcccctccgtagttattgttggctgaaccgtttatcgccgaccgacaccaacccaaattactttgaagtgtggataccgtcttatggagcaaaacccgcagtcacagctgaagctacttgttacgaaaggtaaggagcaaggctacctgacctatgctgaggtcaatgaccatctgccggaagatatcgtcgattcagatcaaatcgaagacatcatccagatgattaacgacatgggcattcaggtcatggaagaagcacctgatgccgatgatctgatgttggcagaaaattcaaatgacactgatgatgatgctgtcgaagccgctgctcaggtactttctagtgtagaatctgaaattggccgtacaaccgatcctgtgcgtatgtatatgcgcgaaatgggaaccgttgaactgctcacccgggaaggtgaaattgatatcgcaaaacgtattgaagatggtattaaccaagttcaatgctcagttgctgaatatcctgaagcaatcacttatcttcttgaacaatatgatcgtgttgaagccggtgaagcgcgtctttctgatttaattactgcctttattgaccctaatgccgaagaagtggcagaaagtgatgatgtcaatttaggcaaagacgacgatgaaatcgacaacagcgccgatgacgaagatgaagacgaagatgaagatagcgacacagacagcgatagcgatgatgataacagcatcgatcctgaacttgctcgccaaaaattcaccgagcttcgtgaacagtacgaaaaaacgcgtcaatctattaaggccaaaggtcgtaatcataaagataccgaactggaaattttacagttatcagaaattttcaaacagttccgcttagtgccaaaacagtttgattatctggttaacaacatgcgtgaaatgatggacagagtccgtgctcaagagcgtcacatcatgcgtctttgtgttgatcaggtcaaaatgcctaagaaaaacttcattactctgtttacaggaaatgaaactaacgacacatggtttactgccgctcgtgcgatgaataaaccttggtctgaaaaactggcaggtattgaagaagaagtacaacgtagcttacaaaagttacaacaaattgaagttgaaacaggactgacaatcgaacaggttaaagatattaaccgtcgtatgtctatcggtgaagcaaaagcacgccgtgcgaaaaaagagatggtcgaagcgaacttacgtttagttatctctatcgcgaaaaaatataccaaccgtggcttacagttccttgacctgatccaggaagggaatattggtctaatgaaagcggttgataaatttgaatatcgtcgtggttataagttctcaacttatgcaacatggtggatccgtcaggctattactcgttcaatcgccgatcaggcacgtaccattcgtattccggtacatatgattgaaacgattaataagctaaaccgtatctcgcgccaaatgttgcaagagatgggacgtgagccttcaccagaagagcttgcagaacgtatgctgatgcctgaagataaaatccgtaaggtactaaaaatcgctaaagagcctatctccatggaaaccccaattggtgacgatgaagattcacatttaggtgattttatcgaggatactaccctcgaattacctctggattcagcaacatcagaaagcttacgttcagcgacacacgaagtattaggtggtttaacactgcgtgaagctaaagtcctgcgtatgcgctttggtatcgatatgaataccgaccatacattggaagaagtgggtaaacaatttgatgttacccgtgaacgtatccgtcagattgaagcaaaagcgttgcgtaaattacgccacccaagccgttctgaagtgctacgtagcttccttgatgaataatcaatctctttgattttggtagtaatacaaacgcctgtgactcacaggcgttttttattatctggtctaaaccatatctgttttcagcgctgataatttgcttttatcatccctattctcttttggtctatcttaagtaaccgctatcgttttcgctaaaaatctgctgattttttctacctctatttacaaaaaatcacccttttatttttacccttgtcgattttttactcatcaagtctttctttttagactatctcattgaaataaaagattattatttaatttattttttctgctctatattgaacacaaattgcgcatacagtcacacaaaggctagacctcgcctcaaatggcacgtataatctcacaccattaaggccccttagctcagttggttagagcagtcgactcataatcgattggtcactggttcaagtccagtaggggccaccaaattttagctgttaaatcagcatattaagccacttcttagtaagtggcttttttgtatctaagggttattgccccctttttgtcccctgagatttttttactgccctaatttttttcatgacatgttacgacaacttttattttctcaaagtatgtcatgctaattttccccaatatatttgtaattcatttcagtttcaaaaatctctatagccaccagcttaacggacagttcgccagcacgcggaagcgcatcacaaaaccgaccatgtagtttggtgtatttgtgacaaactgtgctcagcatatacagatccccctccttactactgacgaaatttgatggagatgtaggtaaatcgttccaatataaaaaccagatttttgtttttttaactacataaaaaatataattaatttaaggtaagtattatattattataaaaaattgtaattattattttataagggtcggtatgtatttttttcttggttttttgttatttctaattgttttgatggttatttgcaggattagagttttatggttggcaagaaaaaatacaataactgaaaagaattttaaaaccttcaaagagtataacaatattgaagattatgaaaaagaagcaaagcaagctgtttatgctgcaacaataagcaaaactctttttgaagaatgccaatgtctcataaccttaagaacaatgcttgaatccctacacactgattatgaaaaatatgaaaaagtaaatccgttattaatggagctattacgcaaaaaatttacttttacatactccgctttcattactatctatccagaacccatcgaagaaagcgggctagaacgatttagtttaattaatacaaaaaaatactgtccagaacatgtatggaaacatattctcaaatccgctatttataccaatgaagaattggatgactattttgggtcgcaggaattactcccactggagcggatgtgtacagatatggatttatataacgagtttaaaggcacggttttatttgatgaagtgatcgggtgctatgttaatgaagaaaacgaaggatctcaaatttttgataatgaggtttattctgttaccgaagaacagttacgccagtggctagatgaagagcttgcatttctgagttatgtcactgaaggtcttttgaatatttgtattgaatacataagaaaagagaatggaattataagggtttgaagtgatggacaaaaacaaacttaaaaatcttaagttttttttgaaaataccccattggttcagcatttgaattattccctttctgaagatgaggaaagaaattaagtgtattatgaaagtctgaactttcggactgggctatatcaactatattgttgatataacaatcttaatctttcaatagaattaattagattattatttattttattgcgataataacttaacaaactttctttttatatcactactattatggtcatacgtcctaatcaacactggttttttcggttatttgattggcacggttcagtgctatcaaaaataatctttcgtttatgtcttaatattgcaatgtctattatcgctattttggtttatcaatggtatgaattattaggtattcatttaactgttgccccatttagtttattaggtattgctatcgcaatatttcttggttttagaaataatgcaagttatagtcgacttgtggaggcaaggacattatggggaaatatgttaattacccatcgcaacatattaagaaatataaaagccttattaccggaagataaacaatttaatcgtgacttttctaatctacttattgcttttagttggagtctaaaacatgagctaagaaaaacaaacccaatggtcgatctctatcgcctcttaccccgacctttatttgatgagataatgaatagcccttaccccactaatcggattttattacatattggcctaaaaattggcgagttgcgagataacaaagtaataagtgatgttatctttcaatcaattaataaagatattaataacttatctgatgtattgggtggctgtgaacgtatttcaaatactcctgtaccttttgcctatacgctcatattgcaacgtacggtatatctattctgtgctctgctaccttttgcattggttgccgatctccactatatgacgccatttgtttccgtatttatctcttatacttttttatcttgggactcattagctgaagagttagaagatccattcggtgtttctgccaatgacttaccattaaatgcaatatgtaacaccatagaaaggaatttattagagatgcaagatatcactccactccccatcagagttaaacctgaccaatattataatttattgtaattaataaaataaaaacaaataaaaaaggcagtgttaattaataacactgccttttttattaataatacatcttttatgttattaatgcgttctcattcctgcgctgtacattaataatttaaataatgaggcgataattgcaagacttaatacacttaaagaccaaataattatcatccatccgatttgttgataccaacgagctttatttttcgttggttttattgttaaaaaatgactaatgataactttcattggcatttacctttccacgaaatacataataactccaactggtataggctaatatcacaggaataattataaccgctccaactaacataaattgctgacttaaaacaggtgctgccgcctgccaaatcgaaatagaaggtggaataatataaggaaagatactgatccctaatcctgcaaaaccaataagtaccaataaaagtgataatagaaaaggctgataatgaccataattataggcactacgaacaatgccccaagcacaagccaatacgagcaacggaacaggtaataaaaaatataaattaggtaaactaaaccagcgttgtgcaatatctgcatgtgtgagtggtgtccataagcttactattgcaatcaccaccagcaatgtaatagccagatacaccgttatagtgcacattttacgatgcagttgatgctctgttttcataatcaaccatgaactgcctaacaatgcataagtgactaacaaagcaaaaccacagaaaatagggaatggtgttaaccaatccaatgccgagccactgaaatggcgctctgtcacattaaaaccattaataactgcacctactgtgatcccttggcaaaaggtagcaagaaaagagccaccaataaaagctgaatcccaaaataggcgatgtttaggaagtgcgttaacgcgaaattcaaatgccacaccacggaaaataagcccaataagcatcaatgtcagtggtattgttaacgcatcaataataactgcataggcaagaggaaaagcaccatagagcgcagcccctcctaatactaaccatgtttcattgccgtcccaaactggtgccacactattaatcatggtatctctttgtattttatctcgggtaaaaggcaaaataatgccaatccccagatcaaatccatctgcaataatatacataagtgtggcaaaaataatgatcgcaaaccaaatcatcgaaaaatcaatattcattatttttcaccctgtgttaattggtcggatttaagcactacagggcctttcttcatcagatgcaccatataaaaatacccgatgccaaatactgaaaaataaaccaaaataaaggccaataagctcaaactcatttgaatatcaccatgagcagaaacggcatctttggtacgttgtagaccataaacaacccaaggctgacggccaatttctgtggtaaaccaccccgcaaggatcgcaatcagtcctgtaggccccattaataaagcaaagcgtaagaaaaagggtgagtgatagagtcttttcttcttacgtaaaataatactcaacaaacctaaacaaatcatcagcatacctaatcctgccatgactctaaatgaccaaaatataatgctagaattaggtctatcttccggtgcaaaactttttaatgccggaatttgcttatctaaactatgggtaaggatcaggctacctaaataaggaatttcaatcgcatattttgttttttcttccgccatatctgggatgccaaataaaatcagcggagtcgcttctttcgttgcattatcccaatgcccttctatagctgcgattttagccggttgatgttctagtgtatttaatccatgagcatctcctacaaacgcttgtatgggggcaataattagtactaaccataaggccatagaaaacatttttcgtacaggtgctgtattttgtccttttaataataaccatgcggcacaagaggcgataaataaagcactggctaaaaaagccccaatagacatatgcaataaacggtaagggaaggaaggattaaacacgacctgtagccaatcaacaggcacgacaacaccattttcaatagcatagccttgtggtgtttgcatccaactattggatgacaagatccaaaaagtagaaatcaatgtgccaagcgctaccatacaagttgcaaagaagtgaagttttcgccccactttattccaaccaaacaacataatgccaagaaatcccgcttctaagaaaaaggcggtcaagacttcataagttagcatcggccctgtgatactaccggcaaattgtgaaaaaccactccagttagtcccgaattgatatgccatcactaaccctgataccacccccatgccaaagtttacggcaaaaatttttatccaaaactgatataaagaaaggtaacttggttcttttgtttttaaccataagccttctaatagggctagaaagctagctaatcctatggtgatagcagggaatataatatgaaatgaaacggtaaacgcgaattgtattcttgctaggtgaaaagcatctaatccaaacataatgcctctctcgatataaatctatattctataaatttattcattttctattatcctaattatatttttctcacaaaaatcttatttagtttttattatgaatgctgattaacctcactttattttcagaaagtaaaaactgaagatagtgagtttatatagatatactatttaaatccccctctcttaattactaaaaaagagaacaacaaaaaatcattacgtaataaatcacataacgataccatggtagccaacaaactgttatttcgtcattttttcaataaatcaagtttaaaaaacttgtccattagcgtattaacatttttaaccaagtaataacagagagtcaaataaattgattttatcacacgatagatatgctctatcatcatataaaataaagttataaagcgtcatttagcctattttactcattgacaatataattacattattttaacttcttaagtaacagaagaattgcagattatataactttaataccaataaattattatttattggtattaacaagtctaaatatatcctttatttctagtaagaaatatattttaaattatataaccttattgctttttatattcacctgctaactattcatcattaaatattattattaacgttttaggaatgtctatatgagtaagaaaaaatcacctattcctggagtgaaaccctataatggacccgcaggaggatggggggcattaaaagcaacagctatcgcggtacgcactcaaatggatgcttttattgcacctaaaacattgcttaatactaatcagcctgatggttttgattgccccggctgtgcatggccagacaaagagcatcattctactttccaattttgtgaaaatggagctaaagcggtcacatgggaagcaacaaaaaaaagagtcacacctgaatttttagcacaacataccgtaacagaattgctgacaaagtcagacttcgaattagaaggctacggtcgtttaacccatcctctcgcttatgatgcagatactgacactcttcgtcctgtgacttgggagcaagcatttactcgtattggtgagctattaagaaatatgccatcacctgatagtgttgaattctacacctcaggtagagcttccaacgaagccgcgtatctattccaactgtttgcgcgagaatatggcaccaataattttcctgattgctcaaacatgtgtcatgaaccgactagtgtaggcttacctcaatcgattggcataggtaaaggcacagtttctttagatgactttgataacactcaactcattattgccattggacataaccctggaactaatcacccaagaatgatgggaacactgcatgaagtagctcgtcgtggtgtacctattgttgtatttaatccattgaaagaacgtgctttagagcgatttaccgaccctcaaagtgttattgagatggcgacttatagctcaaccaatatcgcctcatcttattatcaagtcaaagccggtggtgatgctgcggcgttaaaaggcattatgaaaaccttaattgagtgggataatgagcgtggagatattctcgaccacgattttattgctgagcatacactaggttttgaagccgtagttgaagatcttaaacaaacttcttggcaagatattgaaagtgaaagtggcctttcgcaagcagatattgagagtgtcgcactcctttatgccaattctccggccaccattattacctatggtatggggatcacccaacataacaaaggtacagcgaatgtgcgtctgattgctgatttgttattaatgaaagggaatattggtaagccgggtgctggcatatgtccattacgtgggcactctaatgtgcaaggtaaccgaactgttgggatcacagaaaaaccatctgtcgaatttttacaaaaaatagaacaaacttttggttttaaaccaccttataaacatggtcacgatgcagttaacgcaatgcaagcgatggttgatggcaaagcaaaagcgttaatttgtttagggggtaattttgccgtggcattacccgaccctcaacagtcatttgctgcaatgagaaagcttgatttaagtgtacacatcggcactaaattaaatcgctcacatttattaacggcaaaaaatacctttatattaccttgcttggggagaacagaattagatgtacaagcattaggtcgtcaatccatcacggtcgaagactcaatgtcaatggtgcatgcctcttctggtaaattaacacccgcttcaccattattaaaatcagagcctgtcattgttgcaaaaatggctgctgcaacactgacagatagcaaaaccccatggctaagatttacggaaagttatgatcttattcgcgatatgattgaaaaaaccattcccggatttgataattacaaccaacgaattcgtgttcccgggggtttccgtatgccactccctgccgttgagagagtttgggatacccccacaggtaaagccatgttctcggtatttaaaggtgtgaaagagaataaaatggtcatgggtgatgatgttcttcgtttagtcactattcgtagtcatgaccaatataatacgaccatttatgcacttgatgatcgctatcgtggcatctttggtagacgcgatatactgtttatgaataatgtcgatatgatagcaagaggcttaaacgaaggtgataaagtcaccattgaaacggtcagcgaaaatagaaaactacagcttgataatataactgttgtttcatttagcattgctcctggcacagtggccacttattacccagaagccaatgtccttgtaccattagattatattgataaagagagtggaaccccctcttataaagcaatacctgtcagaatttatgataaaaaaacacaagtcgcttaatcataattcatacgcaaaacaaaaaacaaaggcgagctatttattaatactcgcctttttatctctatccatctatagacctgtactttctaagtaagtacgcatttgtgcaaaacatttttcaattaatatagagcgcggctcttctttgcggatcacaatccccaatggggcattaatggttgcatcaacaataggtacaacatctagatcttggctgagattttccatacctttagcaatagggacaatcgaggtgcaaaaccctgcattaactgattgtataagatgtaatgtagaactactttcgaccaacaccttggggtgtaagttataacgctgaaaagctaaatccacggattgcctaaagtgattctctttatttaataaagccaatggttgtttaaccgcttcatgccacgagatagttcttgttgaaggcataaagtgattgcgatgaaataaaagccctaactccgtttgttttaatgcataaatttcatgctgttgagtattcgctttttccaaatagcagataccaatatcaagactattactattaagtcgatctataatattttcgctattcgttgagagcacctgaaaacttatctctgggaatagtgccgatattttctgcaacatcagcataggatttaaattggttaaaggcacaatacctatacgcagttgcccaaatagttgctgtcgaaagttagcggcttctgcttgtaatccatcgtaagcagattgcatagttttcgcccattttaatattttctcgccttcttcggtaaatccctcaaagcgagagctacgcttgataagaaccacatcaagctctttttctaaattacgtaatcgcattgataaggtaggttgcgtaacatggcacatctcggcagcttgaccaaaatgttgcgttttatccaaagcgattaaataaaataactgtttaatatcgatacgcaataacctcgtcatttgcaggtgaagggaatagttatctgtttttatattgcactattaacaacactaaagtttgcgctgtctataattatttttcaataataaacgaagagaaaagaaataatcgccttatcgattagccataaaataaaaaaaactcaccctaatatttcaactaaggtgagtttatttttactaaaatattaatgtattaattaaagataagcttattctttgatttgaaaaactgatactttatcgatcagattttgtgctttttcatctaacatcatggttgaggtggctccttgttctactaaagccgcattttgctgaaccacagaatccatttgatttatcgcgacggctatttgttcaattcccactttttgctcttccgatgcaatgctaattccctgcatgatatcgcttactttggtaattgaggtgacaatttcttgtatatgctcaccggttttattaaccagttcacgaccatgtgcgacatccgccacagaagctcgaataatctgattaatttcacgagcggcttccgcacttctggccgctaaattgcgaacctctgttgcaacaactgtaaaaccccgcccttgctcccctgcacgagcggcttccactgccgcattcaacgcaagaatattggtttgactggcaatattgtttaccacgtcattgatttcagcgacttttaacgtaccgacttcaatttttttcatcgaagtaatggcatcattcataatgctagcgccatcgatagccaaatcacgcgtttgtgctgtgatagagtttgctaatacggcattattggtattattcactaccgcaatttttatctcttccatgctggctgcggtttgttgcaatgcactcgcttgctcttctgtacgagaagagagatcttgattacctgctgcgatttctgctgaaccgcttttgatcactaatgcctcttctttcaccaaaccaatagtcgatgtcagtgcattttgcatatcaccgacatgagaaaatagtgtaccaaactcatcttttctatttttgggtaacgagaagtttaaattcccttctcccactttttgcaaaatggcagagagcgtattgaggttaaagagaaaggttttattaacccaacggatcactaaataaagcagtccaatcagtatcactaaagcaatacatgtagtgtaaataaagagttgaaacatccatttttgttcgtcttcaatttgatcattaacattttgagttatcactaagtattcatcaaacaactcagcaagttttgaaaaatctttcgataaatcaatattttcataagctagcgtatcaataggcgcaataatagtatcgacgagtttgataaatagtgccgataattgttctgagtttctttgtgcgtcagcactgattttgctttccctttcccaagcgttaattgtctcttttgatttagccgctaatgttttagcttcagaaactaatcgagctttggtttcttgcatatctaaattttcatgaccaatattgactaaaaagttaacatgagagcgtatggttgctagttcatatcttgcctcttgtacattatttaatctcgtggttaacgagtttaatgaagcaaaattatcctgcatttgataaataaaaaacgatgataaagctgatgtcactaagaaaatagctaatagtataatagagcctactttcgctgttctttcaatactcatgaaataatccaccccggtaattaaataacataaatgtattcatatatcggcagtggatagattttatttactcattaatcagaattatcgacacaaatgttttacacacaccaccctcagtgataaaagatgatgttttatactattatcgtagtttattcttgttcattgattaactcttgtttctgctctggctctttttcaagatcgtcaatattaaagactgcgacattatccatcagcacttgtgctttatcgtttaacatcatggtagaagaggcggcaagatcgaccaaagaggcattttgttgtactaccgtatccatttgattaattgctactgcaatttgttcgacaccaagacgttgctcttccgacgctaaactaatcccttgcatgatcttgtttacttttgaaatggaagagacaatctcttgcatgcactcaccgcttttattaactaaatttgtaccataggtaacatcattgatagatgctttaagaacttggctaatctcttttgctgcttcagcactttttgcggctaagttccgtacctcagcggccacaacggtgaacccacgcccttgctcgccagctcttgctgcttctacggcagcatttaaggccaaaatattagtttgattggctaatttattaataacatcattaatttccccaactttcactgcaccttgttctattttcttcatcgataacacggcttctttcatgacattagcgccatccataacaatgtcagtagattgattaataatattatttgcttcaattgtgttatcggtattgttagcaacggctattttgatctgctccatactggcagcggtttgttgtaaagcactggattgttcttctgtacgagatgaaagctcttgattaccagaagcaattttaaatgcgcccccttttatatccatagcctcttttttgacagaaaagattgtcgaggttaatgctttttgcatatcactgacacgggaaaaaagtttaccaaactcatcattttttacttgtggtacagaaaaaaccaagtcagcattacctactttatttaatatctcagacaatgtattaagattagagacaaaggttttattgatccaatgaagcacaaagtacaaaacaattaataaaataattaatgagataattgttgagtagatagaaaactcaaccattgaatcttgtttatgagtaaggtagagactatttttatttctagtctgaatatatttttcaaataattgatcaagatgttcaaaatcttgatcaaattgattagcttttatctttattgtcgctaatttattaggatctaaaactaatttatctatcagattataaaataacgtcgaaatatcatcagcatttttttgtgctgcaacagtcattttcttctctttcacccatgtttccatggtgtttttagccatgatagctagctttttattttgctgaataattttgttacgatctgcgacacgactatctttgtcttgtaatagataattgacattagaacgcataatagccagttgataacgagccatcaacacatcgtcataacgtgcagataagacatcaacttgagtaaaattgttttgcattttataaataaaaaatgaagataaggcagacgatagaataaaaatcaataacagtaaagaagagcctaattttacggttcgtttaatactcatgataaaaatacctatatgcgcatatcgataagatttattttttatcgacacaatgatatttttatttaattattagagataacactaggtcattgatttttattttaaataaatttttatatcataaacaaaataagttatttttaataactgctataattattagtatattataaaataaaacaaaccaattcttttaaaacataattcgctatcaattagtgcattcttctttatgctcaatatcaattttcattttatatgactaatatcatcaacgattaaaaataaaaaccttattttttcaataagatactgatgatactatctcattttgagaacaatgatataataggcgctttacctcataaactctgatgatttacggagctcaatatttatgcaaccacaatttgaaaacgcaaaaaacaccgtaaaaacattatcagtgtttgattttgatggtactttaacctatcacgatagctttatcccttttctaaagtttgcctttgggcgtcgtaaatttgctcgtcgtattatcaaaatggtattccccacattacgttgttttagacgtaaactgactcgtgatgaattaaaagaagtgctgattaaaacttttttaaccgatatcaaagaagaatggctcaaagaaaaagccgaagccttttgtaaagcttactggagtaagttaatgcgtcctgcaggtttattagccgttgctgaagagattaaccgtcatgctgaagtgaccatttgttcagcttctccagctatggtgttgcaaccttttgcggatcgacttggtataaagttaataggaacaacacttgaagtggttgatggtgtgctgacaggaaaaatcattggcaataactgccgttgtggcgaaaaaatcaaacgattagagcgtgtctatggcgatcttactcaataccacttaagggcgtggggcgattcacgtggtgatcatgaattactctatgctgcacaagatccacattggcgctatttccacacaggaagtaataagtcaaaaaaatcacctattaaaataacgcttaaaaaagactcataagtgtttatataaaaataaagcgggaaacgtattttcccgctttatccataaactaactatttatctagtcatcttggcgcttttattagcgaaagattaaatattgacgccatgttgtgcggctagtgcgcctaaaccacccgcaaaaccttggcctactgctttaaatttccaatctgaaccatgacgatagagttcaccaaagatcatcgccgtctccgtagaggcatcttcagaaagatcaaaacgtgcaatttcagtgttattgtcgttattataaacgcgcataaaactgttgctcaccataccaaagttttgtttgcggttttcagcatcgtaaatagtgacagcaaaaaccagttttttcacttcagcaggaactttggataaagtgattttgacttgttcatcatcaccttcgccttctccagtacgattatcgccttggtgttcaacactaccacattggctcactttattattaaagaagataaaacttgcatctgaaagcacttttccatcttcaccgaccatgaatactgacgcatctaaatcaaactcagcgccatctgtcacgcgggcatcccatcctaaaccaaccatagccaccgtcatggttggtgcttctttagttagcgaaacattaccacctttaacaagggaaacagccatatcaaagctcctactgtgttgaataaactgacaattaggaataactgccagtaatttgtgatttcataacatacgattaagaggcgttaataccatattgcgcacatactgagcctaagccccctgcatatccttggcctacagcacggaatttccactcaccgttatgacgatataactcaccaaataacatcgccgtttccgttgatgcatcttccgttaaatcataacgagcaacttcaatttggttgtcatcattaactaaacgaataaacgcaccagatacctgaccaaagctttgacgacgcgcttgcgcttcatggatagtcactacaaagataattttttcgacatcactggggatggtatctagtttgatttttagtgcttcatcatcaccatcaccttcacctgttcggttatcaccagtgtgaacaacagagccgtcggcagatcttaagttgttataaaaaatgaaatcggcatcgctacgtacttttccattagcggctaacagaaatgcagatgcatctaagtcaaaatcttgaccatctgtagaacgggcatcccaaccaagtccgactaggacgtttttcatcgttggggctgctttgcttaaagaaacattaccacctttagaaagagaaacgctcatcttcaacctcttcaatttatgttgcgatattctaatttcccaagaatatcggttatcattatttaccttatttattctttttttctgggaatacaaaacttgccagaatacccagagcaagaacaccaagcactacgaataggctggttgtcgcggaaatgctatatccatgctgccaaatatgatctgttgcattaagccccagctttacagcaataaagaacagcaatgcaataaccgctttttcaaggtgaatcagatactgttttaatgcctctaacacaaagtagagagtacgtaagcccaaaatagcgaacatcattgcactataaacaatcagtggctcacgactaacggcaatgattgcaggcaccgaatcgaaagcaaacatcacatcagaaagctctaccaccgccacacacaacataagcggtgtcgcatataacgcagcttttgtacctcgcccgatagttatgtctttgttttccggttttgctaactctacatcaacctctttttgtgttaataagaaggcatgtccagtaatttttggccatatagggaaaaatcgttttactaagcgataagcaagatgctgtgaatagtcttcaatttcttcactatcattcccacttctcagcatcattacggctgtccaagcaacaatcagagcaaagactatctcaacgtaaggccctaaacttaataagccggtaccaatagcaacaaagatcgcacggaatacaatggcaccaatgatcccccaatacagaatgcggtgacggaaacgatcaggaaccgcaaaccaagagaaaatcgccatcatgacaaataggttatcgacagacagtactttctctaatgcataacccgtcacgaataagcttgcaacttctgcaccatggtggacgtataaaaaacccgcgaatgccatggcaacgactacccagaatattgaccaaaaaacagcattctttaacgttatcggcttatctgcacgatgcataaataaatcgataaaaatagcgcctatcgcaagtacaacaaaaacaatgacagtttctgtcggaaaaccaatatgtgtggataccataattattcctaaacggttccctatataaaattaattacaaatcaaactctgcgggctcaaagcctaatgcaacggcaatagcacgcaccgcctctttttcgtcattgtcaaaatcaccatcacttttcgcaacagcaataccgacacggatcgctaattgtgcagcttctggctgatctttcattgccagaatatacttcatcgtttcacctttaccgacttcagtatcaaattcaaaactgctaattagcttattaaagaattcgatcacctcggaggtatcaaagactttaagctcttctgatgcttttaaaaaaccgagcatcttctgcttttcttcagaactcacaccatcgctggcaatagcgatacgagcacaaactgcgaccgtaccttgcataaattttttgtttttaaaacgactgacttgcttagttaactccgctcgcccggaattaaaaccttcttttaatttattgaaaaaactcatttttattctccttatttcgtgtattcacttagatccagcagtccagcgaaatccccatccgtaggcattatccatatcgcgatggcctttaaaaaattcattgagacgttcaactttgattgatccgttttcattaacaagtcgtgcaatggcacacatagctcgaccattattaccatccgttaaacgtgtttcgataggtggttgctcgggaacatgaatagtgaccacaccatctgttttactccagttaggaaccccttcataaataaaagtaaaaataagcacttgcttgatatttttccattcacgtccattgataaaaatccactcgccacccgctacatcaccagtgcgatcatcaccttgtaactcaacataaggcatgcgattaaaatcaccgaatccatttcctaaggcttggatcactgacttataaccatcttgtagttcaacaaaggcgccaatatctaaatcaatacctttgttaccaccaaataatccacctaataacccggaaccactgcttttactttctcgatgccaatcgaggttaatgcggattttgccgaaatcatcctttttagttaagctaattgcaggtttctctttagttagcgaaaccttgcttaaattcactgagctcggtgctggtgctggtgctggttcaggatcagcaatatcaacaccaaaatattccgccaatggttttaatccaccgttaaatccttgtgcaataaaccgaaatttccaacttccattgcgacggtatagctcacctaaaattaatgccgcttcagtgcgtccatcgatatcaacatggccgttcgcaacgacattattgttagcatcaacttgaatagacaaatgttgtagatgagcaatggtttgttgcccttcacaagttgcagtaaaagcaattctatcgacatccggtcgtaagcgagttaagtcaaccgtaaacgacgtgctattacctgctgttgcataaataatagtacgatcatcattagtggtttgaccataaaacaccatatcagcatcaccgttcacttttcctgaggcataaagcctaaatgcagatacatcaacaggtgagcctgagtgaatacgcaccattaacgtttgatcaggtacggatatatttccgccaggtgttagggtcatttatcgcaccaccgtcgccaaaatatctggcatcatctcgtcaatgacaagccctttacaaggtgagccaaaagccgtgaaatcccattgtccttgattacgttgtaaagcggcaatcacgatccctgtatgagcgccttgttccgttaatttgtaatgagcaagctctttattggttgttttatcgacaactcgacaaaacgcattttcaacttcattaaaggtctgcccacggaaactattgacagtgaaaaccaaatattcaaccaatgaaggaagacgatttaaatcaacaaaaatagtttcatcatcaccatcaccctctcctgttaagttatctcctgagtgaataacggactgacaagttgattttagtttacgaaaccaaatagtatcgatttgtttaccatttacatcgagtaatacacaacttgcatctaaatctatcgaattattaccaccaaagagtccaccgagaaatccctttttcttaataggatcccagcctaaaccaaacattaggtgactcagtgcaggggcttgtttactgagagagactgtctgatccttgcgtaatgaaaccataattaactcccttcaaaggtagaatgaaacaacaatatcacttgcatataaatacaaattataaatcatcatatcatgatgaagtagttcggcaagtctatttttatcaacttacttcaagagattgtaaacatattgaaataaaagaaatttttatagataaacacaattaaaacttaagttaaaaacaaaaaataccgcattaacctaattattttaaattaaagtaaaatagatcacattatgattgacatgataaaatagaaacttcatgatgagaaaacaggttttagcttaaacattcacagtatgtgacgttatgttcaacacggcttagcttatacccagataaatgcacttaaaaaactaattagtacggataataaagaataatgaatagtttgattggctcttctgtttatcgtcgccaactcacttgtggcacattaagcgtaacgccaaattgctcattagaacatcttgatgaactttttgatattgcggaaagacgcaaccctaagcgcgcttttttgtttgtcagtaaagtattagggcgccatattcctgtttcacctaagaaaatgcgtgaaacttatcaacaaatggccaaacaatttcctcaatcactcgaaggccctattctttttattggtatggcagaaactgcggtcggtttaggtgcggggatttttgatgaagtaagagatcgctatcctcaagccctctaccttacttcaacgcgccatcctattgctgatggtgaattattctgtaaatttaaagaaaatcacagtcatgcaactgatcacctactttatttgcctcataacctagaacaacgccaatggatccagcaagcgaaaaccattgtgttaattgatgatgaagcaaccacaggtaatacctttcttaacttgctgtctgcattacgtgaagaaggcaagttaacacaaattaagcagattattgctgtcacattaaccgattggagtggtgatgctctgcaaaagcgttcaccattacccataacaaccttctctttagtgcagggaaaatggcaatggcaagccaatcccgatgcaccattacctgttatgccaaatgtcaatattactgcttcaggacaggttgctatcacaggaaaacaaagctggggacgcttaggcatgacaacccctgctaatgatcttggcctatttattcatgtttctgagggtgaaaaaatattggttttaggctctggtgaatttgtctgggaaccctttttattagcagaacgcttagaaaaacaaggggctattgtaaaatatagctcgacgactcgctcacctattgccactaattttgctatccaatcagcgataacttttactgacaattacggattaggcattcctaactttgtctataacgtggctcatcagcaatttgatcgcattctgctttgttgtgaaacccctgccgaaagtattgatagtcaacttattaaggctctctataaagttgcccctattgttgaagtaattagctatgactaaccctgttattttagccgatcttgacgataccttatttcaaactcgtcgcaaaatggtggatgagttagcgcttgcaccctataaaactggtgcgttggatagaagtttagcgccacgtagctttatgactcaagagcaagctatgctggttgattggatgctagaacatgctgatttaattccagtcacagcacgtggaacggaagaaatgagccgtgtcactattccttttcattcatgggctattaccacacacggtgctgttgtcttaaccccagaaaaagtcgcagatgaacaatggcaacaccatatcacacaaagcttaacaccttataagcaacctttacttaggttacagcaatctattacccaattaatggctgaacgtaatattgatggttgggcgagaattaactatgaatatgatgatttacccatttatttagtgatgaagcataacgatagcgctcgattagatgagctatatgctatcggtgatgagatagaaaaaatattctcaaccaaaggtttttatattcatcgtaacagtaacaatattgcttggttacctgagccaattgaaaaaggtaaagccgtcacttatttgcttaataaattaaaagcagaacgtggcgtttttcctgtgattggtttcggcgatagcctaagtgatcatcgctttatgaaattatgcaattggtatgctattccccgccaaagccaattcgcgaatgcgatcaacacaaaaatttttggagaataaacatgatggatcatcagcctttttcaggctcttatctactgggtgatgttgattttttactgcaacccgtcaagattgaaatgacacctgttgagttaaaagaagaacttatacagtctggtaaacgtcactattctgatatgttaagccaagagccagaacccacaacctggcatcttgaactgtttgaaaaagcactggctgctggcgcaacacgtttagcaacacaagtaattatgctagcaaaatcacttattgcgcattttggtgacacccctattattctgacaagtcttgtgcgtgcgggtgttccacttggcgtgatgttacaacagaccttgcgcaaaatgggaaaaacgtcttatcactatggtattagcattattcgtgataggggtattgataacgaagcgctttcatggattgagcaacgccatgggacagaaggtattgtatttgttgatgggtggacaggaaaaggcgctatcacaaatgagttaattcgttcattggcgggacgtgaaggttttcctgcacaaccccatcttgtcgtccttgctgatccttgtggttgcgcttggttaagtgccagtgatgaagattggctaatcccttttgggattatgggagcgcccgtttcaggattaatttcacgttcaatttggacagagcaaggcttccatggttttgtcgattgccaacatttaaaacaatatgaatgtagtcgctatcttgttgatactgtgggaaaaatagttgacgccttaatagataacgatattccactcgccacatttaaacatcaaccgtcagacttaaaaaaactgagcgaaaatgtcgttagtttacttgccaacaaatatgacatttcaaatatcaatcgtataaaacccggtattgctgaagcaactcgcgccgttttacgccgtgtacctgagcatattctggtaaaagaaattgcagatcctgatgttgcattactgatttatcttgctaaacaaaaaaatattactgtaaccgaggcaggtaaagcattaggacaatatcgtgccgttactatcattaaaaaggtgcaataatgattgaacgattatccccttggaatttaggggcaacgctgtatatgcccgcaacacgaaccgatatcgccgcaacaattattgatcaaaaaattgatggattacgttcattaattatttgtttagaagatgccgtcagtgatactgatattccacaagcattacaaaatctagcaacattattaaccacattatcagactataaaaagcatcatgattgtactgaatggccgttgctatttatacgcccccgccatacagaaatggcgcaatggctggttgagcatgtagatttaaccgtgattgacggcttagtattacctaaatttacccaagcttcattacccctttggtggcgtatcatcaaacccacccatttatgtatgatgccaacattggaaacagaagaagtgttcgacgttcttcaaatgacctcactggcagacttgctactagcccacccttgccataagagaattattgccttacgtatcggtggaaatgatttaatgaatgttatttctcttagacgtaatcgccatttaacactctatgatggacctatgggatacgtgataaaaatgttggttgctgtatttggtgctcgtcagtttgcgcttaccgctcctgtttgtgagcatattgatgatcaacaaattatggatagagaattagccctcgatattgccaatggtttagtgggcaaaaccgctattcatcccaagcagatagacaaaatagaacaggcattaatggtatctcagtctgatcattccgatgcgttgcgcatcttaaattcaacacaagccgtatttaaatctcatggtgccatgtgtgaaccggcaacacatcgccgttgggcattaagtattttaactagagcaaaactgtatggcattattcccaattcaaaaaatagtgttcaacgatttaatacaccataagtttaaatattcgtttttatatttactataagcatttttttatttattaatattttaaacttagtctctagttaaagaataatatctttaactagaactcctatttataaaactttaacatattatttaacaatatttttatttcggttgttattttataaaatctttaatatttgacattatttcagatatacttgtagaaaaataatacagacacaataaaagctgggtctaatttcttaacacacaattgacagatacgtggtaaccaaacatgcaattgagctctcgccaaatcagagtttttaagctggctatacttttaagtacagggaaaaaagtccccacgattaagattatttctgctcttgaatgctcggagccaacgctcacccgtgttttaaaagaaataagagagtcttatagtgctgaaattaagtacagtaaatcatccagatcgtatcaaatgactgaacgaggtcagcttgataataaaacattacgtcgtatgcgagaggcattatcttcgaatgaagaactacaacatagtggcacaacgagtcgtgtttatttagataaagataagaaaaaatcagtatcactatctttaaaaatgtcagcactacggaaaatagataaactttcgtttttaagaagtacaacccgaagtcagacggttgagtttcttgttgataattatgtagaacatttaattcaagttgctctccaagataaaaaataaatagggtaattatatgaaataacttggtatttaatatcgagttatttcattgatatttttcaataaccctgtacggataattgtcattccccctaatggtaaaataatgtttatacgttatttattttattcatttaatgtgattgattaaatccgttatgtttcacattttctaatctgaattgtataaccacttttaaatctttagccggtttacctgattcgtatcgccaatgcttcatcgccagtgaaacagagggagcaaatatcgctgcaataggatcatctgatatcctaatattttgtacattaccatttttatccacatcaaacctaacctctacatcgccttcaatattagcggttttagcgcctgtaggataataaggaaattgtcgtgatactattttcggtttttcgacagaaactacagtagcttctttttgcatatccaaaggtatcgtttttattgcatgagcaacaaacccacttaataaaagaataccgccaaatacccccaaaagaataaattttattttcataattgttatcagagtaatttttaagacattaataattctaatgataatttgctaacttaaaaagagtatagcgattttaaaaaaatactctatatattaaaattcaagattacgaataaaacgataatccgcagacgacttcttaagtcgatagagactagcagggcgtcccttctcagcacgtttttctccggtatcaattaataagtcggcttgttcaatccttcgtctaaaagattttttctggatctctttacctatcaatatctcatgcacatgctgtaattcaggcaaagtaaacacttcaggtaacgcaaatcctggcacaatagaataaagcgatttttgctttaatcgctctctcgcttgcgcaatcagttcattatgatcaaatgccagatttttctgtgctacttcatcaataggtaaccacatcacatgatccacactatcaatatgcgctttacatgcttggtgagcaattaacgccgtgtaacatacagtaacagaccaacctcttacatcgcgctgattatttcccactgagcagagttgttcaatgtacggcgggatcacccctgttttctcttttaattttctaagcacagtatcttctaggcagttgtcttgtgtttcatcaacaaagccaccaggtaatccccattttcctttttcaggatgattagctctttccaccaagagcacttttaactgcccttcatggtaagtgaatagtactgaatcaacagtaataagcggcgataaaaaatcacggcgattgtaatttgctaaaaaattttgttcgttcatggtctgcactttgtaaaaagataatgagtttattttaatgttaaacacatgaaaatcaaattttgtcataaagacactaaatgacttgacaccaatagtgtccataagacaatatactgttaatgtcataaggacactaactggagaacactatgtttaacttaaattatttcaaagcagactcatcaacatttattattaaatcggtcaacgggaaagtgcgccaacaaggtaaaggcttaagtttttggtataattcggcgacaacatctattgcagcactgccgttaaatgcacaagaagccccttttatctttaacttccaaactgctgattttcaggcactacgtattcaaggacaaatttcattccaagtcacatcacctgaaaaagctgctgaagtcctcaactttaatttaagtaagaatggcaaatcttacgccagtgaagatcccctaaagctcaacgatcgcgtggtgcgtattgctcaaaccctgatccaagccaagatccaaagcacccctttacgagaagcactacaacttagccaatccttggttactttagtgatgaaacaacttactgaacacccttcattagaggccttaggtattactattttagatgtttctattgcggccatctcaccctctcccgaaacgcttaaagcattagaagctgaggcgcgggaatccttactcaaagaggctgatgatgcaatttatgcacgtcgtaaattctcagtagagcaagagcgcaccattaaagaagctgaattagaaacagacctatctatacagcgtaaacgacaagaaattgaagaagctcgtttagaaaatgaacgtaccctattacgtgaacaagccgaaatagaaaaagagcgtcttgaagccaaagtcaatgccgaagcaaaacgtaaagaattagtcgcgttaagtgcggaaaatcaacgcatacaatctgatgctgatgcttatgctattgaagcaactatgcgagcttaccgtgagttgcccgttgaaaatctcaaagcaatggctctagcaaaaatggactcacaacaattaatggcaatggcatttgaaactttagcgcttaattcaggaaaaattggtgaattaaatatcactcctgatttatttaggcaatttatgaaaaaaagaggataacctatgaaaaataataccgattttcgtttcatattagtgatgcgaaaaagtcgcctacaagaattaattgagcgttttaacacttggtcacaagccaaattctatttagaacataaccatgttgaggtaacagattatcttaatgaacataatctctatcaaaaacaactcacagaagctgagcttattttaaaatcatttggacgttttcagctcttggaaagaggattattgcctagttatcaattttcctctcatgatattgtagtggtaataggtcaagatggcctcgtcgctaatactctgaaatatcttaatcaacaacccgttattgctatcaatccagacccttcaagatgggatggtaagctcttgccctttgaaatagggcaattgaaagagattataattaatacaataaatcacaaaatgccttttaattcggtcacttttgcacaagcaaaaaccaatgatggtcaatcactgttagcggttaatgacttatttattggccctaaaagccacacttccgcacgttatatcttacaatggggagactctcaagaagtgcaatcctcatcaggcattattgtatcaacgggacttggctctacagggtggtttcaatctattcttgctggagccatggccatcaccggaaaagcatcacaccctcttttacaagggtttagctggagtgataaaaaattacaatttagtgtaagagagccatttcctagtagaacaacaggcaccgctttaacttttggcacgattgagccggactctccattgcaattaggatctttaatgcccgaaaatggtgttattttctcagacggcattgaagaggattatttacattttaatgctggctgtattgtgcaaatcaatatcgcagatagacaagggcaactcatcgcccctaaggggcgtcagcctatttaatgatgattatttagcactgtttctagccctgaaatcatcacatcgagcacaaaaaggaatgcagcttcaccattatcactatccataatatcaatagcttgcgttaataatggtgggtagtttatctctatttttggcactttttctcgctctttttggctctcttgatgttcttgggtttcaagcactgaaccaagtgtaaaatgcgcgatggaacttaatgcataaacagcttgcgttaacgtaaagccagcatcgcacaaaaattgcaattgttgctctgatgtctcaaattgattggctgatggtcgtgtgcctgcatggatctttccaccatcacgatacattaatagcgcctgacgaaaacttattgcgttattacgcaaaaaatcctgccaactttcattcgctaatggcaaaacatgatgatgatgcttttgtaaaatagtctcagctaaagcatctaataacgcacgtttattctttacatgccaataaagtgtcggttgctctactcctaatttttgcgccaacttacgtgttgttaacccttccataccgacttcatttaataaaatcaatgcgttatcaataacctgttctttatctaattttgccatttgcgtcctcataataaaatattcttgacaatctatcactgatagagatatttttcacctctctatcagtgatagatttttaggatatttatgaataaattaattattatcatactgcttgtcacagtattagatgccattggtattggccttatcatgccagtactaccaacactattaaacgagtttgtgagcgaaaacagactcgccaatcattacggtatattattagcactctatgcgacgatgcaggtgatcttcgcacctattttaggaaaattatcagataaatatggcagaaaacctattttattattttcgctattgggtgcggcattagattacctattaatggcttgctctacctcattatggatgctctacattggacgcattattgcgggtataacaggagccactggtgcagtatgcgcatcagcaatgactgatgttactcattctcatgaaagaacacgctatttcggttttttgggtggtgcatttggtgtgggtttaattattggccccatgttagggggattactgggtgagatcagcgcccatacgccatttatctttgcggctatttctcattcgttattatttatattttcattactttgtttccaagaaactcaaaccacaaaaatatcgactgaaatatccgcattaaatcaggaaacagcgcctcactctgccactggttttattaaaaagagtctctgtttttggcttattgcctattttattattcaactaatagggcaaattccggccaccatttgggtgctattcacacaagtgcgtttcgcttggcacactactgaagtaggtttatctcttgcatttcttggcgtattacatattttttttcaagcggttctcgcaggaaaactggcgcaaaaatggggagaacgcaacacggttatcattagcatgtcaattgatgcatttggttgcttattattagcctggataagccatgtttgggttatgctccccgctttaatctgtttagctgcgggaggaatgggacaacctgctttacaaggatatttatcaaaatctgttgatcatcatgttcaaggacaattacaaggaacgttagtcagtctaacgaatataactgggattgtcggcccgttactcttctcttttatttatagttacagcgttgaatattgggatggcttattgtggtttattggtgcaatgctttacagtgggttacttgtagccagttattttaaacagaaatcaccaatattaaaaaaatttccctcataacatacttgtcattaaacaggttgaagatcaagactggcttccttgcagacttgatcttcatttatcgtgataaacgttccttgtctccacgtcgcgcagtctcgatactcatcttgagcaacccaatttacgctacttgcaatccataccaatcaatagcgctattggatatcacttaattccctatgatacgaaaccacacaaatatcataaaatacaaatataacgctcaacttattgattattgataattaatcattggtcacttagtttttcttccgtgaaaatagctcatttccttttttccttagccaaatttcgacaagttgataaccggcgatccccagggcagagccgatccccataaccgcaataggatgaatacccggccataaaatcaacagagcacctgccacaacagaaaccgctgatcctaggatgatcctgccaataaatagtcgtaatgtgataacttcattagcaactagcatcttccctaatgcaataaaagcgccaacaactaccaatgatactagtgtgtgatcatattcatccatgaatatacctcgcattcgcttacagtatttagccgtaaaaagaaccctcacctcctagtatcaatcagataatctgtatggaatatgcaagatccttttgctcaaggataaatacaacgtccttttgtactatccttgcccacttccttgttaatttgtaataggttatccattacctatttttctccacatattagtcattacaacaaattaaataatatttaaattcaatacgttgtatctccacatgtaggtttaacgtgaaatcattatctataaattttgtattttatactagtaactttgttcggttattgtcggttaatggtgtttaaccgaggttaaccgaattatttttagtcaaataaacaaataaacttgtttttcatgatgaaaatcagttaacaacaaattaaaatacaaaaaaacaataatattactggtaattgtacaaacttaggctaatatagaaggtggtgatagattgataataaagagaaaataccatgcgtgttttaacaatttactgtcctgaatgtggtgaaaaagcgatgataaagaaaagtaatcgcaagcataaagagttaacagatctttactgtgcctgccgtgatccgctttgtgggcatacctttgtgctaaatcttacctttagtcatactctaagtcccagcgccaaaaaacaagatgcccttttattagcaatgataaaaaatctctcgccacagcaacgagaaaaagccttaaccttgttacaagagatataacgcttttttacttactctattttgccttgattttatgatcctgctcccattctggtaggtaaataagttaactggttcttatataaccataaatgatgtagatttaatttaatccaacagaaacattcttatatcgcttattaaagcaacatagcaattcaacaaccacagaacgcggttttgattaaaaaagccataaaatgagtcattcctttaatcagaatttgtcgaaatcttatgtaacagcattctgttacataaaatttcaatacaagtttcaaatggagtatatagatgaaaaagcttattaatcgtgttgatgatgttttatcagaacaactgcaaggttttgctaaagcccaccctgaaatcaatctccatccctcttctttttatgtcacccgtcatgatgcccccgtaaaaggtaaagtagcccttttatctggaggtggcagtggacatgagccaatgcatgccggttttgttggaaaaggcatgcttgatggggcatgtcctggtgagatctttacctcaccaaccccagataaaatgtacgattgcgcaaaagcaattgatagcggtgaaggtgtattaatgatcgttaaaaactacaccggtgacgtactcaattttgaaactgcgacagagctactacatgatgaaggtgtaaaaattgctacggtattagttgatgatgatgttgcggttaaagatagtctgtataccgccggtcgtcgtggtgtagcgaataccgtattaatggaaaaattactaggtgcggcggctgagcgtggcgatacactcgatgatttggttaagctaggtcatcaaattaataataatggtttttctattggtattgcactacaggcttgcaccgtacctgctgcaggaaaaccctcttttactctccctgaaaatgaaatggaatttggcgttgggatccacggagagccaggaatagaccgtcgcccatttacttcattaaatgataccgttgatgcaatgtttaatactctaattgaaaatggtcactatcagcgcaccattcgcagttgggatcgagtcaatggtgattggattgaagagacacaagaaaaacagccactaaaatcaggtgatcgtgttatagccctagtcaataatcttggcgccactcccctttctgaattatatggtgtttatcatcgccttgccctgtgctgtgaaaactttggtcttaacatcgaacgttcgttaattggctcttattgtacatcgctcgatatgtcggggatctcaattaccttattaaaagtagatgacgcgctacttactttgtgggatgcacccgttgctacacctgcgatgacaaaataagttttcctataacgataactaaggatcagaaaatggtattaactcatcatcaaattattctttggctacaacaatgcgctcaactttttgaacaaaacagtgactatctcaccgatcttgaccgtgaaattggcgatgctgaccacggcttaaatatgaatagaggcttcaaaaaggtagcggagaaattacctgaatttgccgataaagatattggttttatccttaaaaataccggtatgacattactgtctaatattggtggtgccagcggtcctctttttggcaccttctttattcgtgccgctaagcccaccgcatcattacaaagtctcgatgtaaatcaactttatgaaatgactaaagaaggtgttgatggcattgtcagtcgcggtaaagcacaaccaaatgataaaactatgtgtgatgtttggtggcctgtggttgatagtttaaagcatgcgaatgaccaaagtttatctatagaagatgctattgataatgcactgaaagttgcagaaaaagcggcggaggaaactattcctatgcaagcgaaaaaaggccgtgccagttatcttggtgagcgcagtataggacataaagatcccggcagtgcctctgtggtattgatcctccaagcgctgtctaatgctatccacgcataatcattcacaatataatcaagagaggtctgccatgattaatatcgtgattgtttctcatagtaaacatcttgctgagggtattgaggcgttggcgaatcaaatgcttaacccaacgcattgccgattagccattgccgcaggtgttgatgatgaagcgcaccctattggtactgacgctgttaaaattatgacggcgattgaatcgctcgccgaagctgatgccattattgttatgatggatttaggtagtgccatactcagtacagagacagcaattgaactgcttgatacagaattagcgcaaaaagtgacactatgctcagctccactggtagaaggaacattagccgctgttgtcgcagcgtcatccggagctagcttagaaaaggttctcgaagaagccaaccatgcactaacccctaaaaagatgcaattgggtgaaaacatgggtggctcagagccaaatgatgtcacgccttctattcaaatgcacggcaaagaagctcattgggtggtaaaaaatcctcatggtttacacgttagacctgcagcgacactggttgagctactgtcaaaatttcgtgctgactatcaattaattaagggagatagacgcattaatccccttagtttaaatcaactttctcttattcaaattcgtcaaggtgatgaaataaccttaattgcttcaggagaacaagaaaatgaggctattgatgcctttttagcactggctaaacaaggttttggcgaagcattaccggatgaactcacggagcaaagtttaaccggtactctcgtacccgcttcccccatcaagggaccggcttttatttggcatgagctagaattagctcctattgaaaatttatctgcaccactcgatagcacaatacaaattgagcaatttaatcaagcgataaaagatacactcaatgatttgaagcactatgctgaaaaagccaatcacacattaggtgaacaaataggcgctatttttaacggccatatcatgatgctggatgatgaagaattactcaccaatgttatcgatcgtattaaaacagataacgttagcgctcagcagagttggacgaatgaaatgaaagaacgtatccaactctaccgtactctcagtgatccttatttgagagcacgggagttagatcttcgtgatctgcgcaatcaagttctttaccatttacaacagaaaacgcctcctaaatttaccccatcacaaccctctattttagtggctaaagagttattcccctcgacattaattcagtttgatgcaactcaattattagccattaccttagctgaaggggatagttgttctcacagtgccattatcgccacgcagatggggctacctatgttagttcatttaggtgatggattattaaaaataaaagaagcacaagaattaacccttgatctcaagagtagtgaattaattattggatcaataaattaatgtgctaatgcaataagcgccaaatggcgcttattgataactatcaaaccttaggtttataactctctttatccagttcatgctttttcatgcgtaaatagagttttttacgtgggatacctaaataatcagccacatcgctcacacggccagcaaataaatagagtgcatcttcaattaagcgacgctcataatcatcaactaagttatctaaaggcccttcaggggggataatggcacgatgttgctcactatcaaccattttcacaataccaacagcatagagttcagcgacattccgtagctcacgaatgtttccaggccaatcataacgttttaatatatcgagataattacgatcaatttttggtacggcgatcccaagccgctgagcactttgccgtaaaaaggctctaaatagaggaataatatccgggcgtcttgcgcttaatggtggcaaagaaaaagttatttgcgaaaagtagtaatagaactcaggtatcaatcgcccttcagtgactaattgctgggtattattttctaaaatcgcgatcgttctaaattggcgcttaccctgcctttccatatctaataggtaagcacttaaccaacgttgtgcaccagaaggtaaatcataaggggagcgtaaaataagtgtgccgacttcctcttgctctatttgagcaatcagtggcttaatatctactaaattttgacaatctaccgtagtcaccgctttatcgctgtgaggacttaattcatgtaataactgagcgagtagatgtcgccctgtccccatctcaccttcaatcattaagtctttatcaatatcagcaatttgctgtacttgctgtctaatggcggtaatttgtgcactatcgccaactagacgctcttgagtggtggtgatcatcgtttttctaagtgaaagaagtgattttcgctctttatgcgctttagcaactaactctaaaaatagcggtggattaatgggcttttcaataaaatcataagcgccttttttaacggcctctacagcaaggggtatatcaccgtggccggtgatcataatcaccggaatacgaggatcaatttgttgaatacgcgctaagacttccatgccattcatcgcaggcatgtaaatatctaacactaccgcaccttcatattctggtgtcagcagactcaatgctttttctggcgaatcagtcactctggcaaccattccggcaagattaagcaaatgacgataagattcgagaatatcctcatcatcatcaattaatagtacatcaatatcagacagcagtgactgtgtcatgagtaaactccaaaacaaccatcgcaccgccatttaatgccgatgctaagtaaatttcataaccaaaccgttgcataatagaacggcaaatcgatagccctaaccctagcccaacatctttggtggtggtaaaaggggtgaataattttggtaaaacatcagcattaaatcctttgccactatcggtaatggccactcgttgatatttagcttcatccgataataggtcgacgctgatctgactttcgcccattcctgcgactgcatccattgcattaacaaacaggttaactaagacctgctctatttgtgttggatcagcacaaatattcagttcactggggatattattgataatggtgcactgctctcgtttagagcgcgattccactaataccatggcactttccaccagcccttgtaacggcgctgaaacatagctaacttcagatgaggattttttagaaaaattacgtaatgccgtaatgatcctattcatacgagcacataatttttcaatacgctcaatgggatcaggaagttggtcatatttctccatctgtagtgttaatttaacgctatataagtaggtattaatggctgaaagcggttgatttaattcatgagcaagactggtcattgcctgtcctactactgccattttggccgcttgcactaactcttcttgtgtctgaattaagtgtttttgtgcttgttcacgacgcacaatctcttcatttaattgttggttcttttcttgtaaatcttgggtttttaatgccacaagatgttttaattctaatcgacttaattcttggcgagtaatatccgtgatcgtcacaatatatttatgctcgtctttatgaggatattcgcgaatattaaattgcagaaaatgaggctttccttgttttaccatgctcacaatagactcactttgcccaaacaaataaagcggacttgtgggactaaactgcgctcttaatatcgtattggcttcaccactaaataataaccataatggtttattgctctgttcatgaccaatacctaataaagtagcagcactgggattgacggtttccatacgtccatcatgatgacaagtaattaaactggcatcggtattattaatcagattcagggcattcgtggcttcaacttctttcatttgacgccaaaagcgccgcaaacggcgacttaataatccaatttcatcttgcccttcaattaatacaggctctgttaaatgacctttagcaacatgggcgagatcatcactcaacttatttaatctagcaatcagtcgcctatctattaagattttcatgacaataatgctgagcaatagtgaagcaacgacaattaagataatgacaatttttcccgttgccatcagttgtcgcgtattatcattgagcttattcaatgcttcactggtggcaagcacattacttcttactgcattatcaaactgagataatttttcatttaatttaggagtaagtgctttaagttttttttcggtttcgacatcatcaatcaatgtttgatagatatcaccgtcaaaacgagtgatcgcaataatttcttgcaatacttggcgatgagcaatggtagaaggatagctttttaatttttgatttaaagcgataatttcatcaattttgacacttatatagtgaaatgcgacatcaatatcacggctatagcgttgatgtgcaatttcttccactaagctaattaattcattttctgtagtgaataactcttgaagtaacgttgattctaaaagcagttgtaagctattttcctgtacatttttttcattaagcatttggctgacatgccactcaatttcattaagtagaggcttaatatcttcacctaccgcatcatgcatccaagccaattgacctaaaagctgtgctaacctattttcgagttcacgacgtttatctaataaaatatcttgctgctcaattaagtttgataagtcatccactaattgattataaaaagtgcgttgtgattgttgctcaatcggaaactcgcgcagattatctaatagttgataaatctgctgtttttgttgttctgaaactgatttacgttgtgtttgttcacgctcttttaatagcatctgtaaattagtgctgtaacgctccatattatagctggtggttaacataggtaaggagtcaccaacagacgcattgatttgagtggctaattttccccacataaaaaatatcaccccaccaatcaataaagtgagtaacgaactaaagataaacgccaaataaaggcgtctaccgagtttgcccgattgcttaggcattaatatctgcatccatcatacctttcaaaaaaacagtattttcaactgtatatctgaaccacaaggcggttagggagatttagtttctttcaataaaactaatgcttgttcaagtttttccgcttctaatgtacgccattggtacaatacggctaacgcttgatctgaatattcccgctgatcggcttctttcataaataaggcttgtaatgtcggtgaattagcttctttttcgctaattagtactgaactggctatttttcgggcttgattggttgctgcgatccgttctggtgatcgattttgttgtttttctgcctcgtggatctcattccaaacttggcgcattaatggaaaattatgggtgatcatttgatcaaaaagaacattgaccacttcgctacggcgataagcttcattactgtttaaaataaactcagtattattagcaagctcatcattattacgtaaaatttctttgctgagggggatcttcgccatatcacttttatagataatctcttgtccttcatccgataaaagaaaggcgataaatttggccgcagtatctcttttactgctttcagccacaatagcgacataagcaggtaaaataattgatttatcaaaataactaaaatcaacaaaatcaaagcgtttttggtggttaaaagcgtaattatcaataataggccccgcccccacaatacctctggcaatagcgtcactcactcgtgaactacgtgccgatatcgaagaaaggttaccactggtttctagtaaaatttgccatccgcgctcccaaccatattcttgcagcacattttcaaccatcagttgcatcgtgccagagttggctggtgtcgtcatagttaagtgcccttggtaaatcggatcacttaaatcaatccaacttttaggtgccggaatacctaacttttgcaagtattgtctgttactcatgatcccaatacctgaataacccaccgtggttattttgtcatttaagatatcactatgacgagttagccattttggtgtttcatagttaatcggtaagcgcgcgagtagtccttctctatctaaatgatgaaaaaaattagccgaagaggacatcactatatcaacaggttgcgtaggatactgcttcatcatccgtgtagcgatcgcaacacgccgataaaccacttgtaccttagtttcaggataacgagcactaaaagcttcggtaagtggtcgcataggtgtatctgaaagtgtcgtcagtataaccaatggctgctcatcactttttgctggagtgataaacagccaactaaataatagtatgaggctaaagattatttttattctcatgacatacccctgattttgtgttgaataaacctaaaaatgtgttgagcatcaaatttctgatatttagcaatatttattattttcagtgaatgagtccttaatgacccattttcgatgatgatacgacgatatattcactcatttttagtccaacacctaatagcaatgttacaaatttgactcaccgattcagcagaatgtgtcagctctgactcaaattagcgcttttgccctctgatggcctaaatgaatagcatctgccctgaaaaacaaaatcagcttcaggcatgaataatattcggagtcatctctatgttaagtttctttaaaaccagaaaggatctgccgctaatcgaagcgtccaatgaaaagatccgctcaatatataaaaaatatcagtggcaggtttttcttgggctagtactaggttatgccatgttctatgtggtacgtatggcacttggtgtcgttaaaaagccgatgctagatgccggtattgtgaccactgcagaactgggtttaatggggtcggcgttcttctttacctatgcctttggtaagttttccaatggcttcttgtcggattatgccaatattggccgctttatgtccatctcgctgattgcgtcctcttttgtttgtatctttatgggaatgtcgactgcgagcctattcttcatcttattgtggggaattaatggttggttccaatcggtaggatctgccccttcttgtgtgtctattttccaatggttttctccgaaacagcgcggtacagtctattctatctggggtggctcacgtaatatcggtgaagcaatcacttggatattaactgcgaccatagtgagtttctttggctggcgtgccggttttatcggtgcaggtatcgcgggtattgcagcaggtatcatcttactgatgatcttaaaagatcgtcctcgtacttatggtctacctgatcctgccagtgcatatggtgaagagtcagaagccgttaaatcaagtgatccaaaagaaactcgccgtgctcaattatttgtcctaaaacaacctaccgtatggatcatcgctgcagcttgcgctgctatgtatatctcacgctacgcaatcagttcatgggcggtgctttatctgcaaggctcaaaaggctattcactgattgatgctggctttgctatgtcaacttaccctattgcgggcttctttggcgccatcttagccggtatggcatctgacaaactatttaatgccaatcgtcatatcccaacacttatttatggtatcgccaatattgccggtttcgccctcatgttctggggaccacaaagccgtgttatggatgccattgcattaagtatgattggttttgctatgggcggactggtggtgttcttggcgggcttaacggcttgcgacctgatgccaaaaaacgcagtaggtgcagtaaaaggctttatcggactttttgcttatattgccgcatccgctcaagagcttgtttctgcctcgctgatcaaagtcacgcaagtcggtgatatcactcactatgatttcacaacggtacagtatttctggattggttctgccatcgtgtccatgatcttagctacgctggtctggaatgcgaaaaaagtcaccatggattaataaattaagttgttatcaagggatacttttcagtatccctctttaaaaaagagaatgtcactatgcgtaagacaaaaattgttgcgactcttggccctgctagttgctcagaacagatgattgaaaaactgattttagctggcgctaatgtatttcgtttaaatttttcacatggtactcgcgaacagcatcagtccacagccgcaactatccgtcaggtcgcaaaaaaacatcgtgtatttatcggcattttagctgatctgcaaggccctaagatccgtatagcgagttttaaaaataatgctattcaattaacacaaggggatagttttatcctcaatgcagatttagacagcacacaaggcgatgaacaacaagtggggttagattacccacaacttgtacaagaagtcacaccagggaatattctgttacttgacgacggtaatatccaattaaaagtccgtgcagtaaataataataatattgagacagtggtcactgtcggtggaaaattatctaaccgtaagggaattaatttactcggcggcggtttatccgcaccagccttaacggacaaagataagcaagacatacacacagcagccgctattcaagcagattatatagccgtttctttccctcgtaatggtgcagatattgaatatgcccgtcgtttaattgttgctgctggcagtcaggcaaaaattgttgccaaagtagagcgtgcagaagtcgtttcatgtcaagccaatatggatgacattattcaagcatcggatgtcattatggtagcgcgaggggacttggcggttgaaattggcgatgcctgtcttcctggtgcacaaaaacagttaattgctcgttgccgtgctctaggctgcccggttattacagccacccaaatgatggagtccatgattgaaaatcccatgcctacccgtgcggaggtgatggatatcgctaatgcagtaggtgatggcacagatgcggtgatgctttctgcagaaacagctgcaggtaaatatcctgaagaagccgttcgtgcaatggctcgtgttgcagaaggtgcagagcgctcttttgccgccaatgccgaaaacccatggcaatccccttcttactattcacaaacaggccgttggattgctttagcggcgaccacagcagcttttcataatgataaacatctgagcgttgctgctttaactgacaatggtcaatcagtcacgcttctatcgcgctttatgccaaataacaatatctatgcattaacagataaccctgcacttgctggtcagttgactgtattacgtggtgtaacgcctgtcacttatcaacgtcaaaataataatgatggtgatgaaaacatcatgcaaaaactgcaaacagaaggattattaacagatattcattcactcttaatcacccgtttatcgacctttgaaaaaaccggtgaaagtgactgttgtcatctggttccggtaaaacaagttacaacagctttaacttaattgtctgttatcaaatagcttatgagagaggcaacctgaagaggccaataacaagaaaaacagtatagccaattattttagccacatggaacgtggctatttttctttttaatgcacctaaccatcattatctattaaaaaatagtgctcctagctgttgtttttttcgacagcatcccaatattaattcctatattcactgtattaataggagaatatgatggcaagtggatgggcaaatgatagtgctgttcaagaacaaattgatgccactattgatgatgccattgcaagagcgcgtaaccaaatgactcagggagaaagtgctgagttttgtgatgagtgtggtgaagcaattccattagctcggcaaaaagcgattcgaggggttcgctattgtattaactgccaagaagcgatagataaaaaatataatacctttagtggctataatcgccgtggtagtaaagatagccaactcagataatgagcacacttcttatacaaaaaactgtaccttatgtaagcttactcaatcaaggtacagtttattttattcaatcaactcacgagttaaattttgctgactttcttagcacttaaactatggctcatttcagtaattatctttaagaaattatcaatatgggaacgttccgtattcgggttcataaagacagctttttcccccggaatataaacatagcgattattttttgcatacttagagcaagcaatagaatcaacccagttggtaaataatccctttttaccccgttgtaagaataattttctatgccattgtgcattatgtaccataaagtcataggcttctttatctgtcgcacaggttgattctagatcaaaggcaacattaggatcagagactaagtttggatcatataatttaaacccaacacttgggccttggttttgaggcactatgactttggcattccccatagcaagtaattgatggcgcatatagttcgcgttttgtaggcaatgggcaatgatggtttgatagccttcaatccccatataatgcattgcagaataagccccaaaaataccaaccccactacgtgtacattcaatagttgattgtaaatgggtttgaccttctaattcatgttcaaagtaagtgaagttttccggatcattttcaagggcaacaaagtcattaccatttttcactaacactaaacttgaggtataaggtacatatccccacttatggaaatcgatagtaattgaatcagcatattttagatgtttaaatttcgccacattttggcgtaaaccttctaaagtaatatcgttgatagccagagggttgctattaaaatcataatctaagaagaaaataattggccaacctactgctgcatcgacgtgaatatgtggtttaaccgcgatttcaaattcttcacacagacgatctcttaattcgcaaacgcctttaacatcatcaacgccaaaggtgtccgtcgtccctgtcgtcagcataatagttggtactttacacttaacagtaaaacaagctcttaattcacgctctaagtgttctaaattaatcgtattatcttcggacaccttaatgcggatagtcttgttattaacatcaacccctaatagcgccaagttggtcatattagaataatgacccccttgagagttaataatacgataatcctgatcggctgccatgcctaaatgtttagaattaggcattgatttacgtaaaccaaatagataaccatataagttacacatggtgccaccctgggtgaaaaccccagaggcaacttcgggatcgtaccctactaatttagctacttttttaatggtgactttttctaaaacatcagcaacaccagagtattcacaataaaccatattaggattgcccattaatcctaatattgagccataaacacccggatcgcttggcatcgcaatgacattttcaaccgctaatggattttcccagtttttgcataacgtcgacactaacatgagtaactcgttaggatcattctctggataattaatatgttgctggatctgcccatcagccattaaacggtcaaataacgcctgcccattctcataacgctgtaattgatccttatcattcgtcatggtctttctaaactgtgtaatagactgaatggttttatcctgaaatatcggccaatactgcggatcacggctgaaaaagtgagcaataacatcacggtacttcttctcaaattcagcatttagaatgttagcagaagataaacccaacaaatcttgatttttcactatattctccaaataaaaaccgacaatagcttaaataaactgaatagcaatactatacattttcttattaaaatagttagtgatctatatataacagttgttatttaaatagttaactaataatttattttatttaaaacatatcaataagatagggataaatggcaagctatattgacagtcatcgcactcctacccttgcttttatgtgactgacatcacaataaaaacaggctcactattagcattatcgtcggaattaactgtaataatttgatatataatgaaaaaatattaaaaccaaataacttattgaaattattagaatagatatttaattaaattaattaatctatttttaatgaaattaatgcaattaaaattgcatttaatgtaactacaacactcaaaataagaacaaaaaaccatattatgctttattgatagataatttattttttacttaacttttatgtgacattaaatattaaaataatagttaatgatgctaaagaggcttaataaaaacaatcaagtcaataacattagttatttatactaaaaataattaaaaaattagcataagttaaaaacttaatatattaaactgttaggtcaaatagtattgctaagcgatgataacgaactttaccaataaactaataataatgatgatacagctgaaatagctgatagaagattgagtaggaaaatcaaattgagatggggattaatacataaagcgggaaaagtactccttcccgctttattaattagaattcgaccttaatgtacaaaaattaaaacagtcccaataatgtgccaacacctagggtaaagaagctaaatagccaaatccaaccaaatgagtaacgtaaatgtttacccatatcagtgccagcaagccccatagcaagccaagcggctggtgagaatggacttacaaaggttccggcattattacctatggccatagcatacacaacatcagcaacatggacaccaccactagcagtgacctcctgcacaataggcaatagtgcaaaataataagcatcagtgctggtaaagatatccatgggaacacctaatatacctacaacaatatgcaaattatcgacccaatgagaaggtaatactgctgctaaatcaagggcaatagcttccagcatcttcccattagacatgatgcctaaaaaagcacctgccgctaaaataattgctaccatagagagtgcttgaggagcatgatgattaattatcgctatttgatcttttggcttaggatagttgatcactagagcggctgataatgcaaccataaaaatataaggtgccgaaaataatcctaaggctaaacacgtaattgagccgataattaacagaaggttgatccaaaatttttgtggtttttctgttcctgtttctggctgatcttcatcaaattgtcttaataaagaatcttgctcataaggcgtagtcccttttagttttgctttagcaatacgtttggtttctcgcacccccataaccgcggcaaaaagcatcgagccaaaaataccaattatctgtactgggatgatcttttgccacaattccgcagccgaaataccggttacagccgaggctctacctaaaggccctccccaaggtaccatattcatcacccccatactggtgcacataattagcaacataagataagggctcatacctaaacggcgatatagcggtaaaaaagcaggaataataattaagaatgtcgccgcacccgaaccatctaaatgtacaacagccgcgactaacgctgtgacaatacacactataatgacattgccacgggtgatactgatcatcatacggatcagagggttaaaaatatgcagatctttcattatgctaaaaaaaagtatcgcaaataaaaacatcgttgcgacactactcacctttttaatacctaattcaaaaaaagtagatatttcagtaaatgaataacctgcgacaagcgcaccaattaatggtatgaccgacattgcaataattgggcttgttttccccatcattagtaatgtcacaatagaaataataatgagtaatccgataatcgttagcacatgaggatccttgtagtcgttattatatttgcactttatgttacaaaaatgataaccactcatgtaaaaacagtttcaatgatgtgaagttaatcaccgattattttctatataaatatacttagtaaaaatcctaattatattaaataaagttaaaaatcaaatgaataaaaagaaaaatagacataaaaaaacccaatgcaacattgggtttcaattcaatttaagcaacgaaatgtatcaattagtcttctaataacagaacagattctaatgcaatttcaatcatttcattaaaggtagtttggcgctcttctgaggttgtttgtgtacctttcttaatgtgatcagaaacagtacaaattgtcagggcacgtgcaccatattccgcagctacaccataaatacctgctgcttccatttcaacacctaagatgccgtatttttccatcacatcaaacatttctggatcaggcgagtagaaaagatccgctgagaaaatattacccacacgaactttaatatcttttgctttcgcagcagagacagcattttgtactaattcaaaatcagcaatagccgcaaaatcttggtctttaaagcgtaagcggttaactttagaatctgtacatgctcccataccgatcacaacatcacgtaattcaacatctggtaataccgcaccacatgaacccacgcgaataatcacttttacaccaaaatcagtaattagctctttagcataaattgagcaggaaggaatacccataccgtggcccattacagaaattttacggcctttatacgtaccagtaaaacctaacatgccacgaacattatttacttgacgtacgtcttgtaaaaaagtttcagcaatgtatttagcacgaagcgggtcgcccggcattaaaacgacatcagcaaaatcgcccatttctgcgttaatatgaggggtagccataattcttccttttaatattgatctttcactattcaaatataattcggtagacatattgctatgcctaccgaagtaaaattaaaacattgctttaccgtattctactggtgataaaccgaagtatttcacaacagtttgtccgatatcagcaaaagtttcacggtgacctaatgaacctggtttaacttttggcccataaaccagaaccggaatgtgttcacgggtgtgatctgaaccttgccaagttgggtcacaaccatggtctgcggttaggatcaaaatatcatcttctttcactaattccatcagctcaggtaagcgacggtcgaataattcgagtgcttcaccataaccgacaacatcacgacggtgaccataagatgagtcgaaatcaacaaagttagtgaaaacgatagtgttatcacctgctaatttcatctcttcaatcgttgcatcgaacagagcatcaatacctgttgctttcactttcttagtaatacctacatttgcatagatatcagcaattttaccgatagagacaacgtggccttgtttttcatcaaccagttttttcaacatagttggtgctggtggctcaacagctaaatcatgacgattacctgtacgtgagaaattgcctggtttgtcgccaataaatggacgagcaatgacacgaccgatgttgtaatcacctttgtttagttcatcacgagcaatttcacatagctcatataatttatctaaaccgaaggtctcttcatgacaagcaatttggaaaacggagtcagcagaagtatagaaaataggtttcccagttttcatatgctcttcacccagttcatccagaataaccgtaccagaagcgtgacagttacctaaataacccggcaaattggcacgtttaacaatgttgtctagcaactcttgagggaaagagtttttcaaatctttaaagtatccccaatcaaataatacagggacacccgcgatttcccagtggcctgacggtgtatctttaccagaagagatctcactcgcgtagccataagcaccaataatttccgcatctttgtctaaaccaacagggaatttacctgttgattcttcagccgctttacctaaacctaaacggcaaagattaggtaggtgaagaggacctttacgaccatctttatccgctttaccttctgcaaatgcttgtgcgatatgtcctaaagtgtctgcgccttggtcaccgaatttctccgcatcaccagcagcaccgataccaaaggaatctaataccatgatatgtacacgtttcataattctctctcctgtgtcattttccgtagaccacggatatgtcacttataaatcatcattgagttcttattcgctgacttggcgatacaccattggtgacgtttcacgttttgtctcaccaattaccatcgctttacggacttctgccgcagcttcttgccatgatttttcactattggcatggatcatcgcgagtggtgtatctgtattgatttctgttcctagtgccgcgatttcacttaatccaacactgtaatcaatagcatcagttgctttacggcgaccaccgcctaaagtcacaactgacatacctaaagcacgggtatccatttctgtgacaaaaccggctttctcagcaaatacaggcttacttaataccgccgttggcaggtatttattgtagttttcaacaaaatctgtaggaccattttgggctgcaaccatacgagcaaagacttccgctgctttaccgttatccagtacatcttgcagtttttggcgagcttgttgacgtgagtcagctaaacgacctgacactaacatttctacacacagtgccatcgtaacttcaaataagcgtggattacggtattcacccgttaagaattgtactgcttcacggacttctactgcattacctgcacttgatgctaatacttcattcatatcagtcagtagtgctgtagtttggcatccggcgccatttgctacttgtacaattgattctgctagctcttccgatttctgatatgttggcataaaggcacctgagccaactttaacgtccatcactaatgcatccaaaccttcagctaattttttacctaaaatagatgcagtgataagcggaattgaatcaacggtagcagtaatatcacgtgtagcgtaaaagcgtttatcagcaggtgctaatgaattggtttgcccaataattgctacaccaacatgacgaataatatcgcggaatttttcatcatcagggaaaatatcaaagccgggaatagcctcaagcttatcaagagttccaccagtatgacctaatccacgaccagaaatcatcggaacataaccaccacaagcagcgaccattggccctaacatcagtgatgtaacatcgccaacaccgcctgttgagtgtttatcaacaataggaccatttaagtttagactcttccagtttagtacagtaccggaatcacgcatggctaatgtcaaagccacacgttcaggcatggtcatatcatgaaaataaattgtcattgcaagtgctgcaatttgaccttcagaaacagtattatctctgacgccattaatgaaaaaacggatctcttcttcagttaaaggatgaccatcacgctttttacgaataatttcttgggcaagaaacactgcaacctcctggtgttatagcattgataacgcccacccattgtagggtaggcatacttcataaatgaattaataaccactagacgatttttgttcgccatgaccgagtgtggctaataaattacctaacagacttgatgcaccaaaacggaagtggcgagcatcaacccagttatcgcccataatacggtttgctaatgcaaggtattgcgcagcttcttcagctgtacgtaccccacccgctggtttaaaaccaacttctttgccaacacccatatcgtggatcacttgaagcattaattcagcgctttccagtgttgcattaacaggcactttacctgtggatgttttgataaaatcagcacctgctttaattgagatttcagatgctttacgaatgagcgcaggatctttcaactcacccgtttcaataataactttcagtaaagcacccgctttagcgcaagcgtctttacatgctttaacgatatcaaaaccgatttgttcattacctgccattaatgcgcggtaaggaaaaacaacatcaacctcatcagcaccataagctaatgctgcattagtttcagctaatgcgatatctaaatcatcattaccatgagggaagttagttacggttgcaatacgaatttctggtgttccctgttcacgtaatactttacgagccagtggaataaagcgtgggtagatacagattgcggctgtattaccttctgggcttttcgcctgatgacatagttttgtcactttttcatcagtgtcgtcatcatttaaggtggttaaatccatcaaagacagcgcaaggcgcgctgcagcggttaaatctgtcataaaactctccaacgatgtttctcaagccctctatgggcatacgctttaaggttagcgattaattttgttggcgagcggacttggttccttgaagatgtggttgtaacaagtgctacaacgacagctgagctccctctcaccgcgctatgctcacttcggcgacccgtcattgagctttcgccattccatgaagtttcagcacatcttatttgaacacgctagagaacaattagatgtgctttctgtcacaataataaaatgaaacttgcaactaaagacattaaattgtgatcagaatcacaaaaattttattttctggtttaatgttactcgaataaagtcagtaagtcgtctttataacgtaaaaacttttacttttaatgaaatgactcattaattggctaacttctctacaagttgcgaagtaactcacatatatataaaggtagttaacattacaacagaaaacaaacaaaaagagcagataagcaattacctatctgctctgtaaatactttcttatttaagcagcaaccacagccattgcggttaatgcaaaaaagaagccggcgatggttgcactcattaagttagagagtgtacccgccaaaacagctttcatacctaagcgtgcgacatctttacgacggtttggtgccattccccctaaaccacccagtaataccgcaacagaggaaaggttagcaaatccacacagcgcaaaagagataatcacttttgtttgttcagacaaggccattaagcctgctgctgctaattgtgattcatcttgcagatatttactaaactccgagtaagcatagaattcgttgatcaccagtttttgaccaataaaagagccagcaatggttgcctcactccaaggcacaccaattaagaaggcgattggtgcaaatacccagcctaagattaattctagcgagaagtcttcataaccgaaccagccaccaattccgccaagaataccattaattaaggcaattaatgcgacaaaagcgagtagcattgcacctacgtttaacgcaagttgtaatcctgaagaagcccctgatgccgcagcatcaataatattagcgggtttttcttcatcacttaagttatcaaaagcatctttttgatcatcaggtgtttctgtttcaggaaccaagagttttgcgaagagtaaaccacctggtgccgccataaatgaagcggtgatcaaatactccaatggcacacccatacttgcataacctgccagtaccgaacctgccactgatgctaatccaccacacatcaccgcaaaaagttctgaggttgtcattctagcaatataggggcgaaccaccagtggtgcttctgtttgtccaacgaagatattggctgttgcagacattgattcagtacgagaagtgcctaatactttttgtaatccgccacctaaaatcttgatgacaaattgcatgatacctaagtaataaagtactgctatcaatgaagagaagaacacaataacaggtaaaacacgcaaagcaaaaacaaagccaccgctgccaaatagctcaaacattttgtcggaaactaagccagcaaaaaggaagctcatgccgttttcaccataatcgatgacatttttaacggcatcagaaatagccaataacactttacggccactttctgaataaagtacaaatgcgcctaaaccaatttgaataaggaatgcgccaccgaccgtgcgtaatttaattgcacgtcggttgctggagaaaagaatggctatcaatatcaatgtggccattccgaccaagctcataatgaggtgcattgaaggatccctgttcatataaaaatttaatggattatcaataagcttgttactaagtttattgactctttttttgccagataattatacctagtcccagaaaagaaccctctatatccatcacaattagcatcttaaaaaagtaacataaaagtcacaaatgagatctaaatcacactaaaaagcaaaaaacgcacttaatggataaagtttatttggaaaagtggttagcagtttaataaaaaacggtaatacgaatggcagagtaattactaatttacttaaaactaggcatcatctgttaactgaaataattgtagactattcaggtaaagttggtttgcaataacctctgctgactcttgacgcaattcacaaagagaagaaaaaacagcgagaattcgctcagggcggttaggctcgccttgaaaaccacttacaggcatatcaggcgcatccgtttctaataacaagcgctctaagggtagagaggcaattgcacgacgtgttttttgtgcacgtggataagtgatagtgccccctaccccaataaaatagccttgttgaacaaaacgttctgcttgttgcagactgccggaaaaaccatggatcacacctttacgaggaactgaataacggcgcaaaatagcacttagattatcatgagttttacgtgaatgaaggatcactggtaaatcaaattctatcgccaatttaagttgtgctattaaaaattgttgctgtttttccggatgtggatttgtcatatagttatccaaacccatctcccccattgcaacacaacgtggcgtcgtttttaggcgtgttttaagttcaatcaagtgctgctctgtatgcgcttcaatatataaaggatgcaaacctagtgcacaatatagtgcattgttataacgagacaattccgttaccgcgtcccaattccactgagcaaccgcaggaataataattttttttacctgagcctgttgtgctaaagcaaggctattctcaaggtcgtgataaaagacgggaaaatcaaaatgacaatgcgtatcaataaatcgactcattcttgaacactccttacttcagggtgcacactccgagttcttttttgaatgatttcggcatcttccgctttatctgcttttgcttcattttcaaataggctaaatatttttttatcgtgttgctgaaattttttcttagagaagtgttgaccaatagtggctagaaaatagcgcccacagcgtctaccaacatgataatcatgatttaatgcacttaaacggcttcctaatgcactagattgtagtgttgttggtggatatatttcaatgataacggcatcttcaggtggagattggataaatcttagtgtgtcagtataagtttcaatatggacttgagccatattgagaaagcgttgaaaacggccattctcaaaccattttcccattttatccacccactcggtggtatattgatattcagacggtactgttcgtataacgacaattgtacgacaaccacgacgataagcctcttttactgggatcgcatcactaataccgccatcatggtaaacaacatcttgaaataaaacaccattgcgataaaacgcggggatcgcactggaggctttcacaatatcaagccatgtgcttttttctggttgaaaataatttgccttaaaattgtcggagcgacttgccaccatataaaactcgcgaccactatcgaaacgacgtaatgctttaggcatatttaaaggcatttctttcgaagtggtttctatataccagtcaagatcgagtaaattccccccacgaacaaagcgaatcggattaaagaattggttattggtggtataacggttaatgactctgcgggcgtaacccctttgtccacaagcaaaagcagataagttttgcgcccccgcggatacccctaggagtagatcaaaaggatcaaattgagagcgcataaattcatcaagaacaccggcagtaaagatgccccgctgtccaccgccttcgcaaactaatgcaactttgccttgtggtaaggatgattgaaattcaagtgcagtaatattatttaatgtaaccggtatatacttccccatagagtctccttaatacaaccttataaggatactcgcacctgttttcaaggtcattctttttaatcactaattaaaataaattaagtcgctattaagttagccttgaatattcactgatgattcaacgctttttacaccatcaattttttcaatgatctgaatgatttgtttttcctgctctgcatttttaacaaagccggcaactgtgacatgaccaaattcagtacgaattgaaagtgatccactgtcaatggaggggttaggtaatagtgtttcttcgatttttttcgatattgccgtatcgcttaattcattgttaacattactggtagttttatcaatttcgttataccacgatgtctccgcaatagttgatgtacttatcattgtcactgtcatacccgtgactagcgctaatactaattttattttttgttgattcattgcttccccctgctcataaattaatcatgacaggaaatgtgtgtattttttatcaaattattaacaagtacttcagttacactactaagttatgagtagcaaataaagtaataaatagtaaataaagataactttttgtaattttaatctgaaaaatagccatttatatgtaaaaagtttttattttatttatacaatgagtataaaaatatcattattaggatagcaaagaatagaaagagtaatagctgattaaagggtagtttttattagaatatcgacggaatataaatagtatagataagattattgagtaaatctaaacagatactggggttgattttacaatacatcattgtgaaaaaagccataaaaaatatggctttttatatgatttataacagaaaattagtgttcacgcgtttgatggaactcaatatcaggatagcgttcacgggttaaatttaagttaaccatcgttggtgcaatataagttaagttatcaccaccatctaatgccagatgttgctcatttttacgcttaaattcttcgagtttcttttcgttactacattcaacccaacgagccgtcgatacattcactgattcataaatggcttcaacgttatactcaccttttaagcgtgcaaccacgacatcaaactgtagcaccccaactgcgccaacaattaaatcattattagctaggggtctaaacacctgtaccgcaccttcttcagataattgcaccagaccttttaacaattgtttttgttttagcggatcacgcagacgaatacggcggaataattccggagcgaagttaggaataccggtgaattttaacatttcaccttgagtaaaagtatcaccaatttgaatggtaccgtgattatgcaggccaataatatcaccaggataagcatgctcaacatgagaacgatcccctgccataaaggtcaatgcatctgaaatcaccacatcttttttcgtgcgtacttggtgcagtttcatccctttatcatacatgcctgacaccacccgtaaaaaagcaacacggtcgcggtgtttgggatccatattagcttgaattttaaagacaaaacccgtgaatgtctcttcagccgctgtcacttctcgcatatcagtttgacgaggcattggcgctggcgcccacttcaccaaaccatcaagcatgtgattaacaccaaagttacctaatgcggtaccaaagaaaaccggagtcaattcacccgctaagaaagcttcatgatcaaactcatgtgatgcacctaacaccaactctagctcatcacgtaattgaacggctaaatcatcaccaatcgcttcatctaactcaggattatccaaccctttgattactcgtgagttttggatagtatgaccttggcctgtttgataaagataggtttcatctcttaagatatggtaaacccctttaaacagttttccacagccaatcggccaagtaacaggactacaggcaatttttagctcagtttcaacttcgtccattaattccatcggatcacgaatatcacgatccaatttattcataaaggtcaaaattggcgtatcacgtaatcgagtcacttccattaatttacgggtacgatcttcgaccccttttgaagagtcaatgaccattaaacaacagtcaacggcagttaaagtacgataagtatcttcagagaagtcttcgtgccctggggtatcaagtaagttaactagacaatcagcgtaaggaaactgcataacagaagtggtaatggagataccacgttgtttttccatttccatccagtctgatttagcatgctgatttgagccacgcccttttactgttcctgcacgttggatagcttgtccgaataacaacactttttcagtgatggttgttttacccgcatcggggtgggagatgatagcaaaggtccttcgcttattgatttcattaagaaaatcttggtttgccatgtataaattcttttagtttgtacacggatttgtacacacttttggaagtactctcttttcagttcttcgcttgtcaaatccgtcgtgttaatcgtaattggccgctattttcgctgatcttgactttataaacaatcaatggttatctaatcggttaccatttactctcagcgtgcgccaatgctcagttgtagctgtttgcaatcgttgcttcttcagctcatgaacaactgtggctaaaccacaaattccttcgctaccagaaatcgatgatagcttgtcgtactacaccgatgatggtgcagttgccgttgatcggtattgcagggtattgcgggttcaaaggttttaggtacttctgttcaccatcaataactaactgcttaaaggttgcttctttcgaatcatccaaacgcgcaacaaccaatgaacctgaagagtaaggtaactcaggatcaacaacgatcactgccccctcaggtatggatttttttccgcttggattttccatactgtcgccttttacgcgaagtgcgaaacaaccctcatgtgctttcccagtgacttcacgccactcctcagcatcttcatgggcaaatccctccgctatttcagtccaatcaccggcctgaacccagttaatgagaggaattcttcccttaatatcaggcccgacttctacattaccgacccccaagccaatctcgccatcacctgtggcgagccaatgagcattcacgcgaagcgcctccgcgatctgcatggtgtaacgagacctagccgatttaccagagcaaatctggctgatcgactgctgtttgataccaatgcgacgagccaactcagactgagttaccccagtaagctgcaaggcatggtttagtcgttcggataaagttttcataagcccgcattctacaaataaaactgtagtctttcaacaattttaactgttgacttatctacagtttaaactgtaacattcaatcttgtaacagttattattgtaacaggagacggtatggaagtgttcaacacgacacaaaaacatctccgccgtgccattgacttggtcggcgggcaatcagcattagcacgagccatcaactcaaaacagcaaaacgtctggttttggttgaataaatcagggcgtgttcccgctgaattcgttttacccatcgaacaagctacgcaaggacaggtaacccgatcccagttaagaccggacatctatcccgaatgcccaagcgagctgaaagccagtaaccagtaggattaagggcaaataatggtcagcattttacgtaaacacaaaagcgagttcctccatgcgtgattatggcaaggtctatacccgcttttggctaaagcaaaacgttttgtcctggagtgactcagctaagttgctaggactgtatttgcttacatgcccacattgtaatttgcttggctgctttcgattgccgattggttacgttgcttctgacttgaactgggaagagcaacaggttgccaaggctctaaatgagttagaacaagatcagttcctcattcgttgcgaggaatccggttggactttgattcggagctttctgaagcacaacccaatcgaaaaccctaaccaaggtaaggcagcctttcggttgcttaaagatgtacctgccgacttcgttggtatggcatcgcttttgaaatctcttgccgcttttcaagctcggcttccagaagaattttcatcattgtttatgcctgatggcaacccggtaagggactctcaacggtcggatgactctgagagaagcaataagccaacagttaaaactgttaaccagatacagttcgaagacttctgggatgtacaaatacgcaaagaaaaaaaagcgaaagccaaagaagaatggcttcgcatgggcctcaatgaagaccatgaactcgccttggaagtgctaacacgctggaaagagcaacgagacaaccgattgcagtatcaagatcggactaagacccctatgccacataactggcttttaaaccggcaatgggaagacgagtacgttcgcattgatgaagtacagcaatcatcgacgagcctaaagggcagcaatcaccaattgaatattgaagaaagcaatcgccgcatcgccgaaagctgggccggaccaggtattcgggaggttcgttcaagtgcaggaggttgataaacgcgagtttgctgaggtttggggagccgcttgggccatgtatggcaaaagcgtatcaccgcaattgctatccatcgcatttgaagcccttcgtgcttatagcattgaagaagtgcgaatcggtctgactcggcatattcaatcaccggatactgggcaattttttccaaagcccgctgacgtcatcaagcatatcgacggcaactcgggctcaagagccatggttgcttggaacaaagttgacaaggctgttcgtcaggttggcgcttggacatcagtgatgtttgacgatgcgcttatccaccgcgtgatttcagatatgggtggatgggttgaactctgcaaggttgatgacagggaatacccctttaagcaaaaagagtttttaacacgctaccaggcttacttgctgcgggacgaagtgggtgaatacccaaggctattacagggtattgcagaccatcagaaccagcaaaaaggatttgatatgcaagcgcctgttgccgtgggcgactggtcaaaagcggcacaagtttacacgagaggcatcgccaactttagcgcagtgcctttaaaaagaataagcccgaaagccattcaggcgcttctcggaaatcaattagaggacaaaaatgaaaacgattaaagcaaaaaccattgcactagcgatagccatgtccgcaagcacttcagtctatgcttttccgggctatcagtgggaaaaagcagcacaaagcgttggtattgatccagtcatgctctacgccgttgccttggctgagtccgcctcacatcgcggtctcaacatgaccagtccatggccatacgcaattcgcaatggttcaaatgcaacctacgccaaatctcagacagaagcggagcaactgttaaaccaagcactgcaagagagtgaaaaataccagctcgatattggcctaatgcaaatcaatttgcattggcacggacatcgggtgagctcagcggcggaactgctagaccccatcaccaaccttaccgtcggctccagtattttggccgaagcaatcaagtcttcacctaacgatttagagcttggcataggccgctatcacagttggaacgaagagcgtgcacgctggtatgggcaaagagtgctttctatttatcgcaatattttacatgaactggaggtccgtcaatgacaaccaatcaacaagacttctatcaattaaacttggcgtacctgcacgcagcacgggaattggcgcgcattgatccgcaagaggctgtcttgcgctttggacttacacgcgatgtggttgatgctctgattaatgctggtgttgacgacctgcaacgagtagcgacctcatcattcatgctgtttcaaccaaggggtaaccaaagccaactgattgagatggtgaagagcaaaggcacaggtatcccaagaatcgcttatttattatcaaccctaaacaacaagggggatgcatgattgataacctgtccaaaagtgagctgtttacccgagcctcgctacttattaaatacggatttaggacaaccattatcgcgctcgatactggtttgccaatccacattatcagaaggcttcacaaagaagtgactggcaagtcaccttgccctggtcaattgccagaatctgatgccattgttaaaagcagaagagccttagttgaaggctccctgctgatggcgctttatgtcaatattggtggtgataatgtctacaagcaattaaatattgatgctttgatgaaggcttacgatgcgtacttggttgcaagggaagaagcagatcttccagctgaaatcccctggaaaaaactaaccatcaatgaaggttgggttctagctcgtgatttaagatcacagcttgcatccttacaccggtgtcggtgcggcagtctgtatttgacggtatcacaacagcgcattcagcttaaatgccctgtgtgtgagattatggccgagcaaaccactagagcactttttgagaactaacatgctgatgcatgatttgattgtgcaccgcccgtgcactttgagagtactaagaagatgacaaacttacttaaatctttaacagcacgctgctggtttatatcactggggctttttctggcgactttggctgcggctcatttctttccatcagaaatattaacggcatctgccaagttagcggctttgccatttctgttctgcaccgtcgtttttttcagctacttgggattcaaagcgacctgtaatcccatcggacttatagccataatcactatgcttgtagcaatcgcatattggcaagcgagttggacaattgttggtttgggactctttttcttagctatttgtactggaattagattcttgagtagccaagttaaagattcgggtagaactttgagcattgaagaaaaatggtattggtataagctccattcgttttttgatggcttttatccaaggtatcccaaaaagccaaaaaaatagccagccaaccacaagctggctaccttctattttcagttccttcctgatgcctgattataggccctaatatcgatcaagttgttctgagcataatctcccgcaagcgatgcatttgagatcaccgctatctgcttatccacaaatgctttatcttcttcggacacactgtcaggaatgtaagcgccactctcatccttttgacgatactcatttagcatttgctcccttagacctagcatttcaggcgaccaactcgatgagtcttcagagttgaatacgcgccccgccaaaccttcattgaaagcttgagcaaacacttgactttgaatcggggtcaatcccattctctgcccttcgctgtatgcttcctgtttaaaatcatcggcgtactgttctaagaactcaccgtatcgattgttaactgccgcaccgaatgcccccgccaacatggcttcagacttagtgccccagtttacttcggaggcatactgcgaactcgatccactgtatgcatcattaaacgccgtcaaaggattttccaaagaggttccggcatcaacggctgcttttaacccatcccatgttgatttgctggccacagttgcattgtgcaagaaacctcgtgagccaggttctgcaagggcttgctccttgtaactctcatagtcttcgccaaaatgattcaaggtatgcaatgctgcatcagtatgcttgccactgaaatcaccaatagcactggcgctgttgaagaacatttcagcaccagagactccgctatcatcagccataatgcgagatcgccactgagagccagcttcactgtttagtccagattgataggtacttgtgtcagaagctacggcctgctgggcttgttgctgatgcgcattcagctgtccatctacaccagaaagattggtttggtaagcagattgagccgaattgaactgcgtttgaactgttgcagcatcctcatagcctcccagaacaccggattcaacttggctttgagtgccaccaaaagtaggtgccgttgatgacaagccttcattagagcgtggctgaatagatcgtaaatcggctccggtagccatggccataacagtcattgctgcttgatagtcattgtctcgttcagcgggcgtagaggagttgctataggttaaagactccatagctgcggccacatacgcctgattatcatcaggtagcaagcgctgatacattggaaggttttcacgtaatcggttacctgcttcaacatgctggttcatatagcgacctaaataatccatgacttcaggattatccgctgctaatcgagttaacgtcgcaccatccgtgttcctttgtcctgatagactgtagctggcctgatcaagctcactaaagcggtttgatgccgtgataacgtcttgtgctgaactctgaagtgactgatagtcttgattagacaacgacatctcaacgccagagcgtcttgaatctgaaaggtccttaaccatcgcatcgcgaaactcagcacgtcgtgaatcactcgatgccaagctttgcatctccccagtgagcgtatttgcggtcgtagaccgagaactgccttctgacgactcaacttggccactaaagttaccacctagatccaacccagctcgtacccttgatagttttggtacacgagatgaatctggcttatcaactccaggcaaattaccttgtggagaatcattgcctcccgttccaagaagcctcccaagaaaacccttatcggcaacttctttctcaccgggattagtaatggttccatcgccaccaaccctaaggcctcccgataacacgcccgataccaagccacgtacagcgtcttttttatcgtctccgaaaccataccgtgtttgcaggtcatcagtaacctgattaacaacggcgctagatgcggaattagaagaaccgatctgacgtccaaccgaagaaaggttgtcgtaacttagcttttcaccaaaggttcgactcatggtattgccaacctgacggctaaaggcttgagttgcctgagtcatggattcttttgcagagccgaccattgaacccactgcgtttccgacagagaaactgcttagtaggtttgacgcgccggtcatagcagaaccagtgagggctgaattttggaacattgactgtgattgcatcaccggggcatttttcgcgacatctggacttgccatcttttcatcaattgcatcaccgttttgaagacgtccagccaagtgggtagcggttattgctgagccatacacgagcatgagcgaaatcgccggaacactcgacgccaacatgccgccagtagctatccaggtttgcagcactgaatccatctgcatcatcccagcaaaagatggcacttctgtacctgcaaaggcatcaagagccgacattttcccagctacagttaaatggatatataggttaatgatggccatgacaggcatccaaagttgaatccaaagcaggattaacaagtacttcccggccattcgcatcccgatttggccaagggcaatcacaaaggccatcaatggggtgatggcgtaaatgaaaccctcaaaaaacgtcatcatcggacgaacgatactttggaacagggtctgctccgccgcccattgcgtattgcgctgctcaatcgcttggttaaccatcacggcggcggtgaaagcttgatcatccatatacttgcccgtcacgctttgctcataaataggcaaaagcaccgacgcggtcatgtactcttgggtgttaaccgaggccaaaccaagattattcagtgcatttcggatcacgtcatcagtgtccgttgctgacgaagtccccaatgaggccgacagaacctgtttaagccttggaatgaaggttgattctgtcatgagtttcagttggctgtaggcatcggtgcagtccagatcgctactgctaccactgagcatgatgcgtgtgccataaatacgcgaatcaaacctaatcgcagtcattgggttggggtcactcagcacctgatcgaggttcttttggccaatgtcgataccaatcaaggtgcactctttgatgtagttaaaccacgattgctcgatgtccgaaccggcgacacgatttgcatcacccaacccagagcgatccatcacctgttttctcactttaatcagtgactgtaaactggatgcaaagccgtattccgtcatggcgggagttgagaacgccgtttcaaacaatcgcgtgatttgaaagccaacagtcgaaatcgtactgcctgcggcagcaacaccgatgggcacattatcaaccactcgaacttgtcccgtgtacgcatcctcaatgctcactcgggtactgggtccaaacatggttgcaaagactagccatgagactaaaacgtgttgaaagttaatcccacgaccgccttgcattaaggcctgaacagagaccatcaataccccaatgagcaagccaatgcgaaccattgaagtaaaatcgcctgtaccagtgatcatcgcgacagcgttcaggacctgctctaaaaaagccgaatccccgatggaatagatttcccacatgacctattcccccagcgccgtagatttaacggtgtaataacgctgtttgcgaatggtctgaatcacctggttaaaatgcgccagcaattcttgctctgagccgtatcttcgctgcaacgcagcgtactcatcattgatttggcgacgtgcacgttcaaggtcttcggttaacaacttcgcataggcatgatcttccacacccgatgtgcttctagctgcattgagcatgtcttcaaccaatgcccgggccatctcaacagcaataaatggtgccgctcgtgaagcaaacgacctagcggccccttcatttaatgcagaaagtgttcgaatcatgccgccaatactcgcaggagccgaggtcataaaagccttttcggtggtgctagcagcccctgtatttcgagcaaacttaaaaataatgccgttactagaacctgtaccaagaagtaaattttctacctgagttgataacccggtaagagtcacgttagtgattgttgggttcagacaaccgtcttgcgtcactgtgtcacatcggtacatagcgacgttaccgccatgaattagatgctcaatagtcactttattgccatttagtctggtcagttttggggctttaccttggccatcagcggcattcgctaaatcaccaacgatgatcgaaccagtcaccgacataaccgcttcaagaaaacgatcatcccccgatgcaaaccagcttgatgccgagtgacgtttcagtgctcgccagaccaagttacctttaattgttttgttcacatccgatgccgcgacacttgaagcgttctcataagggttcttaccattggactcactccaactggtaaaaatgtctccagcccctttaagtgagctcaacatgctggcttctgtttgcccctttttaccaaaagcagccagggtatcgttcacgactccctgagccatttgacaggaattgccaaaatactcgttcaactgctgtattttcttttgcagtgtctccatgtgctgagagcatttctcacacatagcactgagcgctaattggaatgcgtatcccttggcatttgccgctacagagcgaagtaattgaacaaactgatctgcattaacaaatgacaaacttccagcgaacatatcaatgccgccacaacctgcttggaatgaaggaggcaccattgagacgaggttttcgttcatgatcctgttacggacaacaacgcttccaccagatataacgccacgccgctgactctcgaatacaccaggcgcagtggtgttggtcattgaaccaaacaactgattcatctcctgttgcaagcttgcttggctcatagatgaaaaaccaatcgcacaggcgataagcgatactcggaatacttttttcatcgttataaccctccttgtgcacgcagatagcgaacaagaaactcagggttctgtaatatcttttcgttaagctcttgggctgacatcgcaagtgacacgccgggttgaacaggtctggtggcatagtaagtttgatcgtcaatccaaccggcttgatgggctgcgagaatgattcgattattgagctcatcgaggctcattgcaccttggccaatcggagttatgacgttaggcgggtcaactaagaacacggcagggacagtcgtaactgacaatgattgagcttgtcctgaatcgactttgtaattaggaaactctccaccaggtaaaggcaagccatcgacagcaatagcaaacacctcgaaaccgtagttcaaagccatggattcgatgataggagcttgagcatggcagtaaggacaatccgaacgatagaaaaagaacaagccagcccgttttgctacttcacctaaagctacatcacgttgagcgccagcttctcgatccatccgattggcagcataagtcgccaagggtctgcgactgatttcatccaaaacaggatcgcccatgaccacctgctgactaacatcagcaaatagtgagcccttatccatcatgacgcgctgaagataaagataggctctgacattctcactcgttggctcatcaattgccttgtccatgaacgactgcatgtgctcacgaaaccaggcagcactgaaaggctttagcccgctcttactcgactctgccgcaccagattccggcttaataagctcttcagcctccgctggcccaggaatgacttgataccaaaaccagccttcctgaccacgctgatagaatggctcgtcactggcataggcgggtaagatgaatagaaagaaaataatgattgggatggtcacccataggataaaccaaggtaacaaaggcgttctcattgtcagctccagaaaatttcatagagctaacatgctaaagaacgccgttaaggtgattggccagatagatgaagaaatcgtgtgtgtttctgactagctgttatgaccagtaacagtaacaacagctaaatttaatgagccaaatttataactggaccgctttctgcgaggagcggacggtcgaacaaactcgttttgggacataaatgagttacagatttcgcttaattagcagttaaagaattagaaaaggtattacaaaacctcaaatggggcgaccaaatagattatgccactacacttggttggatcgcatactcctgaacaccagcggccgtcaacaactcataaaaatctgcgacgttggttcgttgccctctttgctgacaataggaaaaaatagccctttgtttagcgcgagacagtgctacaaaaaatgtcgatagtccttccttatcaccttgcttataagaccaccaagcgttgtcgtctatccccatgaaaatggttgtatcgaattcaagccccttgcttttgtgaatagtcataagaggaatatggttcgtgccttcaaactcatctagcaaacctgcccaagagttctgagtatcaacacagtttataaaaaattcttcgagtgctgccaagtttatttcaagtaaatttcctgtagcgtaacgagaaaaggagctgcgaagatcgtctgagttaataaattttatagttcgctcaaatacatcgcgaccattttcccgtgtcagaggctgttgcattaacatccgtagtgtagaaatgaactttgttagctcgcgttcaacctgtcgtagtgccttttcgtcttcctggttcgtattacgaagaattcgaatatctgatgatagttgattccacgcttgtgcatttcgacggaccagtcccagcctaagcagagtagagaacaaaatggtcagttcttcagcaagcaaatcttgtaatgtagtttgacctattttcacactctcatttcgtaagctcagtccatgttgagcgagataataagatagctgttgttcataatcttctggtttttgacgcaccagaatagagtagtttcttggattcagtgacctacctagcaagtcatttgctatccactcagccaaatgagcagcctcctgatttatattgtaactacaacaaatccaagcggcatcaccagaaattaaattgatattacttgtctgaacctctctcacttcatggtcaatagcttgtgcaataacatgttgtatcctgaccaattcaggtgaagagcggtgattaaggagcaatgaatgtcgttctgctgaaaagtcagcctcaaattgatgaaacacatcacctttagcaccggcccaacccattattctttgcttgtaatctcctactgctgttacctcagcctcacttgatttaaaaacagaagatagaaaatcatattgagcaaacgtggtatcttggaactcatccacaaaaacaataggatatgatgctctaatagatctacgaacatgatcgttagtgcgaacgatatattcagcaagtcgatttagcgccggaaatgacactctggaaacaccgtcggggtagtttatttgctgactcaaccaaaaagttaaaaattcctcctccaaccatgacaacttgggatctcctatacgcacacttccgataaactgattcatgttttggagtctttgcgtaaagctatagatacctactgcgttcccaaaattatttctgaaactactaataagctgcttctcttggtgaaaagatggaaaagagatttcatatcgctttgatgggcgatgatgctcgggcaaagccatgcgaaatcgatctattaaattcttagtgaatgcatcaaaagtcatcgaaataaatcgattgctgacttcttctgaacaacgctctttcactctatctgcgagattttttgcggcatcagtcttgaatgaaatcgccagaatttttttgtttgatggacataggccagtctcaagcagatatgcagccttttgcgctaaaaactctgtctttccggctccagggccagcgataatacttgtggactctcgttgccttagtgcttgccaagcatttggctcaagatcgtcgatccccttcggctgccagtggtcaggtcgaataaacttcaccttgcctcctggttttgaagggttgtgtgaatagctagaactaaagcccgtagctcttctggcgcgttttgagccaactgatctggcggaatagagccaagcactcgaatatgcgtacttggtttacctcttcctaagaacagatatctgtaccagcgcaagttaagtacatcatccgcgtagaagccaggatacccttcatctcccataacagcattgcctggatcaccatgcatagatggtccattagagctttcatctgggaccacccgataatggctagtgaatgcttttaacatcgaataatcaatgtctaatgggcttgaaaaataaactttgtgccgcctgagccattgaacccactgattaatgttattccaatctgaaaccggataattatcaaatgcagcaaggttatgttggtagcctaacagattgaggttttgcccaaatatctcacttgggtcgagcccatactctatcaatttggcaactgcattcttaatccttccccagccaccgccgtgccgtccccaatccagatcgagtaatgttagaaaagggatctgtaaatctgttagcaaacgccacatgtggtttacatggcggccccctaatggaaccatggcgacaaaagatttatcaattggtatgcccatagcttctgatatagcaggaagaattacctcctcggaagccccttccccgagaacaacaactttagcgaaatacaactctggataggctctcaccgcttgctggatgtactttgcagcttcattctcctcatagggtaaagtcagttgacgaacgacagtggtgtttgattctgttgctagtctgaagtgccttacttgtgttggctggattctggcgagaatgctcggcgaatggctagatagcactgcttgcgctcttaagccatgcactaaactgctgatctgacttatgattcgagatagatagtatggggctaggttattctccggctcctcaagtgccaaaatagtcaacgagggcaagaacaagtctgcaccgagaaaatcttcactctccggttgggctaatatctcggtttcaacatcgagagtagctgaagtcatggcgatgtgaaacagcgaactttggccatcacttagctcatcaatgctcctatcccgaccactttcatctgggtgcagcagtacctccaccttacgaacgaattcttcaaagcgtaggtcgaccgggcgaaacttcggtgtactatcagttccagcagagtgcagttcatgccaacgctctgtgagctttccggtaacgatactaatcgccttttcaccctcaaaagattcgttcagctctgtggctttttgagtaaaagatgaccgaacttgttccgaccagttaatagccttccaaagtcggcttttcagaaaagcggatacctgagaaactgcgcatcgtgtggcagggacgtaaatcagttggattcgagaacgatccgctggacgtacattttgaaaatcagcaacttctggctcgccccatgtcgtaaccgcacggaactggctcgtaatgtacccgtctattgagccatcatcttcccattccgcgtccaagcgcaaacgacacttcagttttccaccctcatctgtaacgctcatatgatgaaaaaaatctggtatcacagagtgatctccatcttcatcatccagttcggggaaggcgacaatggcttcaagcgtgagagtccgcttgctgggtatttcttcttccaaagagggaatatgaaaatcctgacggcgaatcgtccgctgctcattggagatgccaaacattcgctgtaaggcctgcatcaagaccgttttcccagcaccatttgctccaaccaaggtggttagatccggatcgacagctatgctctgcccttctggcccgaaacttctaaagttctgtagatttattctctcgatatgcacagcagctccctctcctatatgcccatagattatatggggcttctattgcaaactttcaactgacaaagtacggccatgtgatcgcgtatcggttactggatcaaaaacgaccaccttggggtgccgtaataagagctacgttgaagtcgcttcaagcagtgttatcaggttagttatccccctgacaactgtttcaagactctacgatagtcatctccagacatcgaagcactgacgccgtatgccaaggtgggagcaggcaaagtcatcacaaaatctaccttaatggttttatcgaaaattgacggcatcaacgcttctagctcaaatgaagcgaacaggggcaccactttcttctcccaaattttagacaatgtagggcaaactgcataacgtggtttgagtggttacgcgttgctggcacggaaaggggctgaaaggagttacgcttcaaggtccactattggcacgtaattaatattcagaaatttcgaatactacattagctcactttactgcaaaaaccgtaaccaacgttttcattgagtcctcagaaatcataacaaagtgcattttgctaccaacatgctgccaaaactctgcctcttgtacatatttttttgctttttggatagagacgctttctggtaactcggctttagttagcgcagaacatagcagcattgagcataaagccttccaaggatgcttgggcactccattagaaagccgttccacaaaccgttccagtgcatgacgagtcaccacgacaggtccaatgttcggaacgttgattacctcatcgatttctctcactgtagcattatcgacgctgtattcttcgaaggaatgtgagagccaatcgccccgcttctctaccgagatctgtgcttcttggtaacgggtgagcaagaacctagtcaagctgtaaagtgaatgctgagttgagcgttgtttctgtaactttctgatggctcctttactgacccggatttgaagcccattgccgcttcggttactccccatcacctctttcactgacaataggtgatgaatagcatagagctcagctgcaattggcttttgctgctcaggtagcttgtcgtattgctcacctaaatcgacctttagctcaccacctcttcgaaggccggtcttccagtaaaccgtaaactcaccatcaatctgctttgttaacagggttaataccatcatgtttgtttctcctattggttatctatttttcattctccatgttttttcaaatatgcaaggcgcaaaaaaaggggccgaagccccttggatcagatatgaactttcgtaaagcccatggcaccgtaaacattcagcacatcattccaatcccaacttttcacgccgagtgacgttggtatcggggggatcaggacttgtgtcagaatgcctttttgccaggcttttttcttgagttcattcgctgcattcaggccggtctcagagagatcgtgatctgcccagatgtacagcattttcacattacttggtggttcaaacctagccagtagggttgcattcacaaccgaccaacatgtttgtcccgttgctctggtaaccgctaaagctgtttcgatgccttcagaaacacctaatacttcaccaggctcaccaatcggaatggcaccgccagtgattgttctgtcacttggtatgggcatcatctttttaggcttttcaaccggcgctttgaatccatcttcacttaggtagatccgatgaaacgtggccgaacgcccttgctgagtaacgattttacctagcagcgctgggtagctatcgataaacagaccatcttcatcatggtaaggcaagtttggatgaaacctcagcaccgaatcccattcaggacgaagccgggtaacaatgccacgacgatgcaagtagttccaaactggttgcgcacgagtatctgcaagagatagcgtttctccccaggtttgattcaagcgatggataatcgctttgtcctcgtcctgctttctagccttccaatcaacagcgttacgcgttattgcccgagaaggtgcttgtatttgtccgggttgaataccaagaacttggccaattgcttcaatagactgagcaaagttccacccattaatccaagacaacagttcaaagccatcatgaaagatcccgcaggtgttacaaacgccacctccggtatattcagcatctttgaacagcctaaaaccatcacgaccgccatgaacaggacaagccacatgacggccttttcgagcaatagcggcatcaagttctggcaccaacgccgccagtatttgaagccattggccattaagatatggccttactgtttcaatttgtaaaggtaacgccatataacctccttaaataaaatgccgactcctaccacaggtggtaaaagtcagcttaggtcctgcattgagccgtttggttaatgcaggaacgttagtcaagctggataccatgtcgtcttaatagccacatgatggaatcacgaagcacatcaggatcgacaaccgcagccatcgcgcaaacacgaaagcaaaatggcgctatttcgtcattttgaatccacgacaacacatcctttcgcaatcgagtactgacacgaccgtccagcaatacacggatcgcatccaatagaatgccttcgcgtaactgccagatttccgtgtcagaccaagtgactggggcatcatcaaactcaaatagaaattcgagctgtgctgatgtgtgctgataggactgcttttgtgatgaaggagaatgggcaatgcgcccattcattaaagataaccgcgttcggcaagcgaaacgcagccctcggatgcgaccacgacatggtcaagcgttcgaatatcaacaagtgacaaggcgtcacgaagtcgatgagtgatgcgtttatcagcttcactgggttcaggatcacccgatggatggttatgaaccagtatcactgctgccgcattaaattccaacgcccgctttgttacttcccttggatacacgctcgctgcatctaaagtgcctttgaacagctcttcaaatcgaataacgcgatgctttgtatcaagaaacagcacgccaaagacttcgtgctcatactcgtgcatcagtgtttgcaggtatgagaacgccgatgatggctgttcaattttgcgacctttactcaatcgaccacgggcaagcttaagcgccatatctaaaatatccgcttcagtcacttgctcaggaacgatgtaagtaccggcttcttcgccagctaagaattttttgtttttcataggagtctccaaaaaaaacggagacgaacccattccctgaaggggacggaatcgtccccgcagggtggtaaaattgatgtggttactgaattaacagttgttgtgttacttcgaataactcacgcttcagatctttgacgtcgttaatcacgatgctttgaggaaagaatttctcaacactgcgtgtttgaatccctattcccagcagctcaaagccacttcgtctgcaccggtcaacaatgtcatgcgtggcagcccaatcatctgggtcaccatccgttagcactatcattagctttcgcttctgtttttgcgctaacaaactatttgccgcaaaccacatcgcttgtgccataggcgtacaacctcgtggtttttggtcaaaacaggcggcccgatgtcgaaccgattgcttgggcaataacgcgatagaaacttcctgatgaataccaggaaaataactgaccgcaggtacaacacccggtatgccttccagtgccatggccaaagccaaagcggcttcattggcaacatgaaagtactttcgattaccttcgccaatgggtttacccattgaacccgatatatcgaccagcaagtgcacagcagcattaggcgcaatgcgaggttgcctttgaataaacaatctcgactcaccggcttgtgaagcggcaagacgatgggttgcaactcgaagaccgtgccttttggcatgattccgattgtcctgactggactgaaccatgcccctaagtcgggctcgaatttgagcggactcagacgccgataaggtcaaaatggcctcatcacccaacatagcttgctctgcttggggcaaactgagtggagtgacaccctgatggccttcagcttgttccgacaacacttctgccacttgggcaaaggtatcgggttcaaactgcgcggcactggcctctaaggcttgtcgcaaattgtcagcttgatcagagttatctgaatcccccgtttcagcagcatcccccattgcagacgagtctgcttccggggtttgactgtcactactgttattgctgtcattactcgcatcttgtccaatgtcattaccgctatcagcatccgactcatcctgtggtggacgagattcgtcttccaacatggcaacgatggcatcgacaagtttcagcacttcacctgtagatgccaggctaggcactgctgtcagcatggcgcttaaccggctcatcgctgcggcaggaaagagttgtctcactctttcatcaactgcttgatacaaaggcgtcagtgctttctgacccagaaaatggcatctcaagcggaacaacaaccatgcttgcaagttagatgcaggctcaagctgttcaggtacacacatttgctgagtgtccaccatgtactcaatcacttgcgaaatactgcgccgggttccggggtaatcctttgccaattcgttttcaattcgcacatcctcaatgatattgagaagtgccttacggatcggtttggacgacgccttctgcaccatgtcaaaattggtatgccgaatatgcgccgcttcatgagccagataaccccaagctatctgttgatagtgtgggtcgtctgggtttgctgttgggatcacaatccgctcaccatcggtaaacgcatcttgtccttgaataagcaccttcacaccaaacttttcgccataagcggcggcaacgattggcagtgcgttttttaatggatgattcatgggagtctcctaatcattagggggaatactccctcagcgggagcgtttccccgctgcgaatgtaagtgtttaaacctgtgcttttagcttatccagatcgtatttttgacctaaccaagccaccaattgagctggactctcgtgctgctcaaatgacgttttaagctggtctaaactcaggatgtcatccaatgtcagaccgtactggtcttgtaactgagtagacacctcgtgttgatattgcatccaggcccgctcaaaagcggtttgctgcaatgccatgtttggaacaaataccatggccgttacccaagctccttgtgcgtccgcatctgcgatcaaaacagggttcttggggatcacgacactatgtgttgagtacgaccgttgtactaacgttcgacaacacgccacttctggtatcgattcactttcaaccgcatcagtcacaccacgaaaatgtgcttcaaactggttcagttggctggggttatggatggttgattgcataatttcctcttacatagttcagaggacatgcgcccttcagggcaacatgccctcaaggacgttagaaataaaatgagtttggtacagtcgaaccaaggtttggtctgacggttggttgtggtattgcacgtaagttatctgcctgagcagaaactggctgtgcgggtttaggttcaggtttgggcatcagttgtctgatatccaattgaccttcaccgtgcattctcatcttgtctggatcagacaaaattaaaatggtcgccatcagttcgtgatagagattgtctatcacagggccggtcttcggcagacgaacaaataaattgtccatcgcttcaaccatcggctgaactcgatgatccaggaaggacaaaccatccaacttgtctcttaaccgcttgagaggattaagggctcgctgactgatttgattcttacctgcaacggaacgctcaaaaagctcattggcatcacgagccacctccctaaagagggtgtgtcccatgccattgaccttgtcatctaagcctccagcttgttcagccggttgcattcgatagatggcataatcgaactgaagccgttgttccacgtcttcgatgggtgataatgcacgtcggattgcatctgcaaattccgggtgttttgcaacccagtcaaacgtcacctgatcatagttgtccaggaacaactgcttacactgcgcaaactcctgaccgatccggtcaagctcaggaacaatctgatcaattcgatcttcagggacggcatagccacctaaaaaccgtacaccgacttgctcacacaagcgctgcgcttcttttttaagcctttcaaagttcgccaatgcctctgggtcgcaaatttttttactccctaagctggcaacatccttcggtggaagttggctgccattagctaatctgaaatcttcaggccttagtttttttctaccgctccagatggaacagtcgatgtgacaaatcaacagtttgtcgagggtttgaatactcatagtgcatcctcatgcgagatggggacgcaccactcccaacaggagcaatggcccccgtttgagtggtagtagttgacgcgctaatggcaataccactatcagaaatagtaattttgcgaatcaggcgacgattggttgagatcgattttcacaggcattaagtccagtgcttcagctatcgggcgaacccgctctaaatcactgcctagcaaccgcaatacatctttttccaacttcagttggtcggatacttctatcccttcaggactcgctactgtgagcgaacacagtggtggtaattgacgcttaaaagccagtaacagcaacaatggccacgggccatcatcagtgttaacaatgccagcaccttcacctgacaccatgctgatttgattggtactaggtaatccgcttttgcaaaaccctaatgaccattctccaatcctgacctggttatcatcaatgacagccaagccataggcttcaagcagctttgtcatatcgaacaacgctttttgcgccagcgagatttggccattgacgtccttgcgagtacgaaactcccaactgacgttattggcgcacgcgacgctatcaagcgcatttgaaagttcaaatggccgcccttgatgatcaatgccgacttgtccaaccaatcgataacccttgttgattttctcattgattcgtcggtctgcttcagcgttaggatcagtcgagtcaatcaatcgctgctgcgacaattgaccggcttttccaaaccgaacttcaatctcctgggtatccgatccaacgtaaatggcccattctttggctgtcccatcagaatgactgtaacggtaaagagcaaagcacttatccatcatcaatcctcccaatggtcaccgaagacatcagcggcaatacggtgaatggcttcacgttgctccaactcagcacgagccgtcaaagaccgaatcagtgcatattccactgcgttaggagcgcctttaaaagcaagtgttaactttgcccagcgcaccaaggtccgagtggacatggtgatactaagctcagcaccgccatccgcgcccccaataaagagacgacgaatgtcaccagccactttcaccattttctggcgaaagacttctggcaagcccggcgcaacgttctccagaatggcttcctctacagaaggctctgcataggtcgcttcgatgattctaaagcgatcaagaaaagccaaattctgttggagcacaccttgatacaagcccgtttggtcaccgctgcccgcactgttgccggtagcgataaaacgaaacttggcatgtggcatgatgatctcaccgccattttgtgcgatgaccaacggggcaccttccaaaatgtcattgagcccagccagttcagcaggctcagcaagatccatttcattaatgatcagcaaatggccatgcttgacagccagtgccagcggtccatacacaaaggtcatgttgccattaaccagcgtgtggtgaccgataagatcggacaactccaatcgaccatgtgcagtaatttgctgaacaggccaattcaatcgagaagcaacttggcaaattagcgaggtcttaccgcatcccgtggggcctgtaatatacaaaccgtcaccgtcggggttagacaagaacgccaatacgtcacgtaagtcttcttttctaaaaacatactcgtccttgcgaacgggaatgtttggatgggtagtgtcggcactaaatccttccagaacgaaagcatcaggagccgggacattaaacgcttgattcacttgaaccaaaaatggggattgttcagtcatggtaaacctcatctgttttgacgaggccccatgccccaacagggactgaagtccccgtcgggtggtgtgttgattgtggtatggctgtgtatgtaagagttcagctcgctctatcattcgtacccagcattggctacgagtgaaactgctttctgatgcactcgatgtaagcgcattagaaaggagccgaaatcggctccaagtgaacgttaaaaataaaatgagctcggcgagtcacctggcagaaccaagttctcttgctcaaggctaattttgattggtgtttcaacgggctgatctggcttattggtgctgatgcgcaaccgctcttgtggcgcttttcggtaggctgctaaaacctgttcgtccagctcgcctaatttatcggtggccaattgcttatagtccaccgtacccgccatcatgtagcggctgagtttgaccccagcatagtcggcatgagcgtagttacccatcatggcgaccaattttgactgagcttctcgcatttcttctttcaaagatttgatgtgactttccagtcgaaccacctcggcatgtgctgagcaatattgccgagacagcgatgtccagcggtattgggcttcacccttgggaacaaaacaatcttgctcagggcattttgacggttctcttttggtttgaactaactcccaaaactgaagcgccgtttcttgcaattcagttaagaacgccgcgtctcgttgtatttcaaactcaatcagttgatcctcaaaatagaaaactaaccaaccacgcgtgctattggcgacctgtatttgatgctgtacctgcacccaatacaactggtacgcctcgctttgttctctgtgagcttgcacatcctcaaaaactgactggcaaggacatttcagttcaacgggttcgcccgcatcgttgatgccatcaaagctggctcgaaagattgcgttatgatcggcttctgcacataacggcagaagaaagtcattatgcgcattctcaaatgctcgccttgcttgaggctccaaccgaataccgcgaagcacattaggattattcgacaggtcttccggtaatacgaatccggttttttctgcccataatcgccaaggtgttttgtagggagaacgccccataataattggggcttcagatgccgtaacccctgcaatgcgccactggtgccatgcaggagtacgctgtgataggtcgataaccttcatattgcctcctttgaggggagactcccccgaaggagagaactccccttcagggttaagtggttactttgcagcttgtgctaacgctgtttggtgctgaacaacacttgcttgaaccgaatcaattgccgctttaccggcttgaatcgaacctacgacaagggcaacaaccaataccaagcgaaaaagtgaggctgatttagtcatggaagatctccaaaaaaaaagacgagaccttccccctgacgggagaataatcccgccagggttagtaaaatgaatgcttgtcgctaagaagctaaaggctgtgtgagcgctttggctgcttgttgctgagcattaaagatttcttgcttcgcaaacgtcagctcaacaccttgaaaatgttcattggcatattccaatgcactattccatgcgtttgaagcttccgcccgctcgataagcttgtaaacaagccctcgggttcgatcatcaacttgctcgggtggaatcacagatggctcaacaacgtgtgttgcttggccttcgataattcgctccgcttcgtcttgatcgaaaattcccacaaagccaaacgcaatgcgggaacactggatcatggatttatgtcttagcattcgcttagtgtgcgtctgccatggaccatctacacggtaagggccatttttgccgttaccctcaaaaggcggtcgatagacttcatccagatactcagtgattttgactgggtgcgaacggtcgcgccgatagatgatgcattccatccattcagggcattctttcgcgccatccagtgagactttgttttctgaagtcttaaactccatgccatcaaactggtcgtgttgattgatgatgcgagaccatccatcgacacctaccactgggataatcccagcttgtttatcagggaacgcaaaaatctctttggtgaaagggttcaagccgtactgatctgcaaccaccaagagcgccatcatctgctcattggtaggtgcactaccgtcacgttgcttgaatgctgttgcttttagggtatcgaacagtttgtttggatcgacactaaagcgctcagcaaagcgttggattagctttggtttttccattgtggactccgacaatcaaagtgggagtctgcccctgacgggaaagtactcccggctgggttaaagcatttttgctcggttaaaaatctggttcaggataagtttgtgcccaattagcttgggagctcgcatcatccgccggtgatggctcagatgctttattcacactatcaagaagcagaaactcgtccgcgtccacttcggtcaatcgatgcttaatgccatctttctcccatgagcgcgtgcgctggggcccttgaacaaaaagcttcgctcctttttggatcaaatcttttgcccttagccctaacttaaatccaccacgatctcgaaaaacaacccgatgccattccgtatgctctttgagctcattggattgacggtcgcgccatttctcagaagtggccagcgaaatgctggtcaccaaatcacctgatggataggctcgcgtctctggctcagagccaacgtagcctatgagtgttacttggtttttcatgatgttctcctcgtcttagttgaactctgtgcacacagttgcttctacccggctgggcaaagaagactgacgacgcagataggttggtatttcgagtaaagccatgtcgtactgatgtggctctttgtaaaacgcagatgtcaaacggggcataccaggagctttaggcaccgccattggacgacgttttggttttggtgtgagcaatcgcttgatttgagtaagtacaaatcgaaacgggcgcacgctttgacgagcaagcaatcgcaaaagcgaccagctcagttttgcaagcaacataatgcctgcgatttggataataaatccgaagatatattccattggtgactccttatattggttttgaaggagtcacccccaactggggaaaactcccccagttgggtggtgaaaaggcgaaccgtaaggaacgcatggttgagcatgtaaaaacatgcaggctatttgtttaaggaggctagctacctcttagtaccactgagaatactcagcggcgggcttcctttgagctcatgctcttaggcgcagatatcactgaaacagatcagcaatatttgatagtcagtgtaaccgtcttatccagacaggatagttagaaagatgctcaattcttccacctagctgaaaggccattacctcacagaggattaggctagggactgattattgtcatatcaggagcaaacttatggcccaagcaaaacccaattactcaaaacccatctttgaacaatcattcacaattaacagcttacaggcacaacgtgtcgttgaccgtgtttttagacggacggtcagtgcgctttacggaatcgatgtcatcctgcgcatcattggcgatgagaacgaaattgatgaagtggaacagatcattagccagttgatcgaggattgcgctaaagcggtagacagcgaacaagctcgtttggacaaactaatggagtccaacggcatcgatgaagtacctgactacaccgacccaattaccttcaacgccaaaataagctcgccccaagttggccagtttgttggcttagttcgcaaactcgatgcgttgatgatctcaatggacacactctggttatctagcgtgcttagcaacaagcaacgtgttgatggtaactacgcatggcaacagcgcatcatcaaactggctcgacgcattattgatatcgaaattcgagcacgaaaatcagcccaagcgaagggtaaagaagcagaggttgaacaagcggtgcctttaaccgatgacgatatcactgaagaggaaacagatacccccgccaactagccaactaggctcccatcaaccagcccctctcgaaggggctcttcatcttgctgtattttctatcaaaatcgttaaaatgaatttaactgtcatttttggccaatttacatgaatagaactaatttgctcgttactttctttatagcgttgttcgctatccctgcatttgcagaacacccaacatcgttcagccaggcaaaacgatttgcccgagaaatttaccaagacaaccagagtacgttttactgtggatgtagctataacaatgatggtgcgattgatgctgcatcttgcggatatgaaccaaggaagcaaccgaaacgaggtgaacgcttagagtgggagcacgtagtctcagcttgggaaattggccatcaacgccaatgctggcaaaatggtggtcgtcggaactgtgaaaagaatgatgctgagttttctaaaatggtgtcggacctccataaccttgtaccatcagtaggagaactcaatggggatagatcaaattttcgatttggcatgattccgaatgaacaaagagcctacggtcaatgtgatttcgaagttgatttcaaagaccgtcgagcagaaccaccagctaaccgtcagggtgatattgctagaatttatttctacatgcgtgatcaatacggcctaagactaagcaggcaacaaactcaactatttgaagcttggtcaagaatggaccctgttgatgaatgggaaattacacgagacaatcgaattaaagccttacaaggcaataaaaaccaccatataaaatagataataaaataaaataataggggcagtatgcccctattctagattcccactaattaaactgtatttatcttgaaatctcactttgcaacttagctacgaatggatctatggatctatcgtattcattgtagtgatcaatgcccgccattgaaccatattcatcgtcagctttttttgcaacattgttgacctccgagtttaaatctgtgaaaaccaacaacgaaccatcaacttcctcaaaactctcactataagaaggatttaacaaccttacagtgctagacaaattacctaaagccgcattaaaaccggaaacgtctaagatcgcatcggctttacttgagccatccaacttaacaagttcagactctctatcgctaaaagcctttgatattagcgacttcctattctcaagtattgcttctcgtatgagttttttccttaactttgtacgagtagacttcgcagaagatagtgtactacttgaacttgagctatatgatggctcatcatcttcagtaacagcatcatatattttttttgccccccatataacaagaggagcagcgagccaccaagccataaatacctcccatcaaaagttagtcgctagacttaagaattaataacgtgtcatcgataagtgagacacatacatcaacttcatcaatatcatattcaactttcgcatcagcctttaaattttcaatatattcatcagttttgatgattagctcatccaaaccagctttgattgccttagatgtactattccaatactcagttacagctttctctatgtcatcaaacaccgactctttacgaattgcttctgcggctttttttgcgagtgatttttgccaactaccaccagctagtcgatatattatgtaaccaattgccgcagcaagagcaatacctatggtaataggaccaccgatggctgcaacgaatgaagttactgtagtaacacttccaaccaaccctaaagacaccaatactccagctgcctttccaactaaaatatatgcacctaaattacttgctatagtcgatacatataatgccatagctccaagacttcctaatcccgcaagacctccaacaaaagccgctctcgagttaaatgcactaaactctgcacccaatccagatatttgggtatcaactcctgtagttgagattgtgggggcagcttcctgccatctcagcaacaaagaatctaattccgtcgatacggctttaccactagtctttaatgtgctttctaattttgtagtcaaaagctgaccaatataattgcctaactcagattgagcctctttcttgtccgaataggtgtcattgataagctcttcgagaccttcaacagaagtattgtatttgtaataggtactcataacatccaagtcgtgttttttgtggctattacatgattcaatgagggagttaaaatcttttatcaactgagtagacaactcacgaaatcgcgcatccttctcgttgacctccttaattctttcgaaagtctccgatttcttgttctttagattatcaatctcactcaatagcatattttcgatattctttagaatattagaaatatacttatctactattgatgcttggttcaaagttagagacgaagccatttcggtgatttttcgcaatgtatcactacgatagtcattattttcacgccaaaatggttgaactcgtgctgttagttctgaactttctggtaattgcgtaataaatccatcttccatccatgatgaaaatattaaattatctagttgcttcttaattctcttgaaggttacacgacctacagcttccacatcatccctgcttatttcagagtgacaatgagactggatgaacattaaatgatcaagtggtttctccttatccactggtggtctctgcctgatgatatttgatgcaaaccctaaatcactatctttgaaaaacccggtatgatttgaaacaaaaacaacaccatcagcaagttctacaccaccgagagccttctcagtatcagactcatctgaaccgttaagatcccctggggtatccaacaaccaaaccgaacgaagtatctcggaatctgaaaaaacaattgcgatataagcctcatttaatacatcatcttcatgattgtgtactcctaatctatccaatatttctgaaccaccttgttcaattaaatatttttcgacatcaactggtgaatgaaccatatgcggcttaaagcccttcttaaacacagccacatttcctgaaattgtttcaggcttatctgattcgtgcataagaagattaacaacacatgttgctggttggtatttggtcgggagcagtgactgattgataacagtgttaatcagtgttgacttacctgcatcaaaatgaccaaaacatccaattacaggctttctattaagtccatctactacagcctcaagctgttcaaccttacttttaagccctattgaatcgatatactcatgattgtagcaatcgatactatctttcactgatgaaataagcgacttcgctgcctctaccttaattttgatagtttgctcaccaacttctgacataatgtaatcatcctctttataagtgtattccgttaaaatttcataatacttgcttggctgaatcccaacagctgataaatacccagcaatcttaattgcatcagcattcattggttgactttcaattcttgaaacagcccgttgatccagtgttcttccaattccaaaaacctcagaccttgcagcaacatcactttgggacaaacccgcattttctcggcttgaaattaagaaagttcttaaacgctcatttagttcatcgtgtttcatttttcagacctatgatttcagccacttgtatataccgtaagttccagcaccaatcgccaatggagctgccgcagtaattgcaagtccggcaaccattccaccaccaactacaccacctatggcggcaagaccggaagtgacaccagcagcgcttaaacctgcaacggaacctgccgctgatacggcaccaattgaaccacctacaccgccgaggccaccaacagcaccagcgactttcgctttatcttccatttccataccaacctctagacaaatatgactaacacaacaacaatttagacaattaagtctaacatatcaacacgtcagacctatttgtctaaattttttacgttaaatgtaaattgagaactgtacagctcagcacgcaaggaatacaaattccaaggttgggtaatgctttctcagaagttcaatggttatttcatatcgatatagaaggctttgcatcacaaagccttctgttctaagagtgcgctcaattatttccagaaatttcttccgtcgcctcctgacgcagtttctgggcatccatgccgtttagccgttcaatggccctgtctgcggcactctgacgatttccatcaacgtttagcgtgcttcctgagccggtgagtcgttccagatccagtgacggcacttcaggtaggttgcccgtgatcgacaaaatacctatccattcatccagattgacttggctccaatctacctggtttaactgactcgcggtcaaaccttcacagtttggtgacttggcactgccccaaccaaggcccaattgaggacgtacttgttcttgaataatccgtgaaagcggcgaagtaaagcagcaatatgattgccgtttctcaacacaggcacctaagaacttagacttgcagtaagagcctacgtagtggcaactcttcaatacccgcttagcgttcatctcaaactcactctgctcacatttccagataagctgaatgaggatcatggtgactgaataaatcatgtaggccgtcataaccgtactcagaaccgcgcccgcagcgccacccagcgcaaagttaccacccgaaacgacaccatcggctccaaccgcgccaccaacgttactaaacagagccgattgtgcccccgaaccaaaggtcgtacctacccattcagccgttttgttggtcaacacctgcatgaagcctgtcgctgcttgctctgctcccgcgccagcagccgttgatggcccagcccccatgagagagtcccatgcagacacaaagggctctttgaccgcactccaggtactggtgattggttccctgagcgtattccaggaaccatagattgccgaagacggattcatggccatgactgccgtatcaagcttgttgaccgccactatcatcgtgatgtagtccgatagcgacacgccacttggcttttcacagcaatccactatgccgccaacggcttttttgcactggccagcattacctttaaagaccgtacactcgacgttgtcttggccatcagctcccgtgcatgacatatcattggtcataaactgcgccgcattaagcatagctgcggcttctgcaaagttagcctgcttgattgactctggctctaaacaatctgtgcccatgcagcgaactggcccctcacagttgtattgagtttccattcgtgcattttgcacttcaacgctttgtccgcagtcatacaccaaactttggatatagcagaagccttcatgaccagccccgccttcagtgcattcggttctgacatactggcaggccgggttttgctccagcgcggcacacgtattggtggtcgtgttttgtccgttattgacgatggtttgagtattaccattggcatctacccagctatctgagctgcccatgttgaactctggatgagaagtcgaagcattgtaggtcgctcttgccctccagcatgagagccccagtccatcagaactgccgcgactggttaaatgagcaggagacgaaacaaccgccggataaaggcttcccagattggccaactcgccactaccaaccgttaacccgtcgattcgttttgtgcccgtatccaaacaccgccactgaaccgcagtaaactgatccgtttgcatcaagcattggtctatgcccggatcacttgattgatgaacaacgtcttgctctaagtatttgccagagaaggccaatgaagcgctcagtttcccaggagccaaacacttctgaacttctcggctgcaagtatcgaaatcgactttgttccagccggactcacatttggaacgcgtgacttcctgcggttcatgccacgaaataatcgacccattaacgaccttgcacaatgagccaaccaaggttccttttggacaggtcatttcagggtatttaatggacggtttcgtctctgtgaccgtctccttgttgcccttaagagagagtgtcgttttccaaccatttgccttagatggcgactcagtgatttttatctcagtattttgattatcaaaaatcctcagtgtcgcgtttccagtttgcatggtggtgctgtgctgtggaacaaaactgatgatttcagagctaaagcaaccacgctcaatggaccagctttgttgatgggtttcagcggatacacgtcgctctaactgacactgagtaagcgtgctgatcttctcgcacacctggtaatccggtacatgcttggtttcagtaaatggcgtaatcgtctgggtaggctcacaggcctcaaaactacttggcataaggttggataccacacactttggatcgctggtttgcaatccacagtcataggtatcggtaaaacgaatgcattcacctttatcattggtctcggcacattctgacgacatgaatccacaggaaggattcgcttcaagcacttggcaggcctggttttcaatccccttatagctttcatcatccacactcacttgaacacgccgacacaaaggcgatatgccagccactgggcttggggcaaagtaggattcacaaactgaaacaccattgaccaccgtacatccgttggttgaagacggctgatccgtgcattgaatactgtagtctgaaaacttcgccgggatatccgcggcttgttcgatacaggactgtggtgaccaactatcattcatcaccaccttggttggatcaaagcgcaccttgatgcgtgcatacccctcaccactacccgtaaccgatacgcgaatttttaccggcacttctaaaccgggttctaccgcttttagcctggcagtgagatcggtatttggattgcgctcccaactggtactgagctcgcagcgacctgccgtttctggtggaaagttattgttcggcccagaccagactttctgatcgccaagccacacttgcatgtagtcatcccatttggcgtactcaagaacggctgaggtaatcgcatcggggttcactactttgagtgtgatggcctgttcaaacactttacaacggccactccagtagttgtcgccaattcgtccaatccaaacttcaagacatccctcaccacaagagcgaaggttcattggtcctgaaacatgctcaataatgcctgccgtgtaatcgtgagtaatagtgcagctgttaaccgctgtattgagcctgtcgcattgctggtaatttgggctaccttcaccttgagactcacagcctgggaagctttgtgttaatagatttgggtcagtttgaaccgcatcagttaatgcccaaagcggatcattgaccatatctggccgagacctgtctttgatttgctgtagcgaacgaaatgcttcacccgtagcgccactttcggatgccatgctctcttggcgctgtgtccccaattgattcatgctggcatcagagccataaacgcccgttaagacatccaatgagccctgatccataccagggaaaagctcttgcaagttaatggactcattaccactgccattcggcaccgacaatgtattgccattgagtgcgggcatcgtccagttttgcagcaattgcttaccttcttgttgtccgcttaggccggattggcgctgtacatcagcggccacaccatgtaagggcaagcacgccatagtgattgataaaacacccgctaaaactcgggtaaaaagtgttggtttcatatttaacctcccgagttacagcagtcttgccagcgccacaaaatgtagagcgcatcttcaccggcaccagggattgttcgccactctccccatttcatggtgctttcaccgatgacatgcgcactttcagtttccggtacagggaagaacatactcatcttgtattgggatttcggcagcatgggttcgataacaggtcggcatagcgcactgttccccattgttcgcctagcaagaccacgcctgtgttgagccgcgattgcacgcgccgctaaatggctggtattttctgctaatgagccaaaggctaaggtgtggccagataacggatagagatggccccaactgccagcacaccaaaacaactggtcgatgggtttaccaagcgttgatgaagcagcgtcagcggtacaagcagatatagccaatggattggcaacggcagccgcttcaggctgagtaaaaaaggccagttcatcgttcagccatgttgggtccaattccgacaaatacatcaagtcaaagtccatgtaaccatcggcattgcaattgccatccatgaacaaatcgagcatgaccaaaagcggaaaggcgtaataatggtaatggtagaaagcaagatcaccggtatcgtattcaccttcaccatgaccaccttgcagtcgtctatcacctaacggtaaacgaatccctcccagggaaggcgaacaacccggcgttctgaccagttcaatcagacgcgctggctcccacatgctggtaacaatacctggccttggcacgcctaagttgtcttcacacaagcaaaatgacttgtttgatgcgccgcttgggacatttccagaaccaagaggaagaccggcaacccggataggaaaaatgcatgaccagcaaacatccgtcagcaacttgccggacaataaccccgcgtctgggcaagtcaattcggcttttgcaggaatagatgcgcccaggacaagcatgacaacgagagtccgcatcagacgatacgtattattgagctttttcatgaacaagctcctttgctggaatttcttctatttcaaacgcgagcccctttgcttgaacaaacgatggggtgacttgcaaatcaaagcgctgctttagcgaggcattgagaaggtaaaccggactatccaatgtcttttcgagcgcatttaggctattccaaccttgagtacggtcgagctgcgtggtgataagcgtaatgcggcgcagtgtcctatcttgcgtctcaagccaatgcgcaactgcgtccacttcttcagcgttcgacgcattaaacaccacaagctgctgagtaaacggcaaggcttttagcgggttaatacgcgttcctgctgggatcaatgttcggccattggcatccaatagtggccgctgcatgacgatggttggatcaaccgttcttatccgatactgcgtggctttgggtaagtcagtgaaagtttggcgagaccagaatcgctcaatggcttttttctttaacgcgcccaggtcaagcgactgtaaacgctgcatcgccacttgcatcaaatccggttctaaaatggaatgaatcggaccgcgttgacccaatgaaccggtattgcctgtttcaatttgacgctgcaaccagtccttgctgtaaacccctagtgcacttgcagtcaccttgtcatcttctatgcggaaaatggcaggcacgctagtcacccgccagtgcacaaaggctttcggatcgattcgaacctgaggaacaggatcaagtcccaccatcagcgtatgccaatcacggatagccgcccccaaggtctttccttcaggaattccccgaaacaacacaatagcgccggttgcactggcctctttaaatagctgcttcagtgaggaatcccccagtgaagacgacgcaaaaatcaaccattcatcgttgtgtttgagcgacgcaggttgttcaatcggtgaaaaaggctcgataaattcagatgaaccatccacagcactttgtaaaatgctgcggctcatttcaacgatctttttgtcctcgtcagacaacggataaggctcttgtgcccaggacacttgaacccaagccaatggagcaaccaacaaaaataagaggcatggtcttctcatcatccacctcctaccaaagcggccaagcgcgaccaacaatctgctcgcgcttaacggcattccaatagcgggagtcgaaactcgttgcagcctcgccggaaaaccaatattcgttttcttgcagcgtcaatgagcggctaaattgtgattccgccacaccaagacgctgggctaatgccatgccggtagagacttcagcaccgttcaccagcacatgctcaggcgtcacattgacttcatccccaggcatccctgttaggcgtttcagcatccgagtaccgtcgttatataacggagcgagtccttttgagtggaaggcatacaaaccatccttaacgggctctttattccataggtcaatcagatacaccgtggtatcaggcaggcagcgctcttgctgggtatcaatacctattctgtagcgcatcatggcgtaggtgcctaccattgccatgattaacgcaaggatggtcaaacggatgagatatggccgccaaggcattcttttacggagtatctgcatgagacacctcctttgagcctactggcacgaatacagaatcatctgcacccaccaccgcttgggcatccagcacgataaaaccggctgcttttagcttttcaatttgctgattggtctgaagcaacctagattcgatgtcttgttcgctggcattggggcccagtgacaacaccacctccccaaaatccacgactgcaatgggcgtacttaacgccaactggctgtggatgggttcgactgttttcattaaaagccaactggtcattaaaccgctaccagcaatagacaaagtaatagaggccataaatggccaaagcgtggtcttattcatagcctcgctcctttaacaactgggagatggcatcagcaacagaaaggcctttgcgcgttaactgcttaatcgcgtttacatcttctgcacgggacgagtacaacagcttgtgaaacggatcgacgataaggcggccaatcccggtgcccatctcggtaataaagaaaatctcggaatagacacccgtgacggtatgaaccgttttcaggtattcgtagccgccttcacctaatggcaaacggccttcttttttgagcgcgttgatggtttcggctttttggccaagcaggtacatattggccgagttttcagcgatggctttacctgtagggctgtcgtataaatcgttgaccgactgcgttactgttacagcactgccgccatattttcgaaatcgacggtaaccggtttcgatgaacttaccgacatcaccttgagtcagcagatcccaggcttcgtcaatgaacacaatcttgcgacgatcccgctcacctaagtacatctcttgttggatttggtagataagctgaagcaacaccacttgttgcaggtgcttacgccccttgagctcttctaactccagaacggtgaaacggtttttgaagcgaatattgttgtggccattaaagaagcggccatattcgccttgtgtcgtaaacggatagagctgctcacccacgtcttgcacacgacggtcatcgtgatttttcaaagcctctgccacatcatcaaccaacatcgcacgaccttttttctcccacagttcacgggtctgacgttttaggttggccatctgaaaatcggttaatgactgcgtaggtgcggccattgcggccaataacccaaccaacacatccgcttcttcgtcatagtcctcaacgatttcaaacggattcaagcaaatgccactgtcccggccgaactgtaagaactcaccatcatagacttcacacagcttttcataagagcggccaacatcaatcacccagcattggccgccttcagataagtaggaggagatgatttcgttcaccaggaatgacttacccgaccccgattgcgccgcgatgcaacagttgtaattactgcccgagtcataaagggacacactcatgatctgaccattacgggaaacaaagttaatcactggcgtgcccgtgcctttccaatccgcaaacaaaggcaacagagggatcacatgccgtgtcgccatggtcttgaatcgaaacaagtcgttcatcgcctggcggtcggcaccaaatggcagggcattcaagaaaattggcaaacagaagtacttgtcttccatcagctcaaatccgagttctttgaaataagttcgagcatttgaaacagagctgatggacgcctcttccgttggtgaaaacagcgtcaaagtcatatttgcccgaataggacgatcaccttcttgcaaggcttcaaaaagaacatcaaatccctttttcttggctgcaagcaccggcacaaacttgagcatcgggccataggcctgattgaccgcccattgacgcttcgtctctaaacgagatcgcatcgcctcagctgagggaaagtgaatggtgacatttagcaaaaagctgccgcgtaaaccgcgactgcccgtcatcatgtcgcccgcaaaacttgcggcatgaccaaaccagatccgctcaggcaggcgcttaaacgatagggttttaactcggtaatcacccagcatcagaccttgactatccactttgatagcccggtcataatccaacacttgctctcgaagtggcttatctgcctcactgcggattggtgatggattacgccaggaagcatcttttccccagttaagctgcgcacttaatgccgcgagccagtttcggtcagtcatctcagtgacgcgaaaaccaaccgttgccagcgcttgagagaaagaagcccgaagcgcggatgctcgacttaattcacgctcagtcggtataggactttccaaaggcaatttgcaggtgactatcagttgaaagttgcgtacctgagtctgggtcgattcttctatcggttgaaccgtgcccccatcgagaaaatccgcacgtttgcgtatcgacgccctgagtaatggatcggattgacgatgccgtaagcccatcatgcgctgaaggtcggtttgaatatcaggcgaggcgtacaggccaaattgcagcaaagtgtcttttggccagtcgttgttgagaagaacattaaccctgtctgcaacagactcatcaccacccggcaatgggtcacatagaaaaccaaagccaacactctggtcttccatgaaaaacagttgctcatcgtctgaataggccaatactggcaatagctcagaagcgcgttgccctgaatacagagaggctttcattaacgcccctccaaccaagcagaaagatcataaggacggcctcggctgatgcgaccatcattggcgacgatgaaaggcacaccttgaatgcccaggatttgagccgtcaccaaggtacgctgcattggttctaagttgcaggcatcatcctgttctaggttaccaatccggccattcagcaatgcatcggtggccgcttttttgtcacgcgcacagccaagctggcgaacctgacgctctgaatcaggaccaagcactggcacagggagtatttggaaggtgtattctttggttagcggtaaagcttgtttcaaaagctcatggcagtgcgggcatcgtggatcaacaaagaccaccactttctttttgccttcgcccagcgtcagtgggttcaaatcatccatttttaaaccaagacgacttaagtccagcgtgtttcccgcttctcgaatttcttcaaggctagtaagcggctttttcgaccaggcatcatagagcgtgccatcaatgacgaaccggccactgtctgacatgaaaacaatacggccattgctttcaaccgctttcatacccgtgacaggcaaagaaaccatgccgtcaattttgccaacgggcgacacttcagacactggttcagcttgaaccaaaggagacagcgcaagcgccagaataattggagatagttttcgcatgaggagtcctcgctaatgtaaatcgaggctccagtctatgcagttgtcctatgtggactcggttagatagattgaagaaatcgcaatctaactagggggcttatagctcgttgaggtttgttataaacgaattactcggcgtttgcgttaacaagccaatcatcaagcacttgcttcaatttatctaattgctcttgatgttttgcttgattctttgccaatttgttaatgttctgcaacttccaacgaatcgctggcaagtctgctgcattaggatagtcaaacaatgcccagtcaggttgccctcttttgaatgacataaggaaagcatgatccctttctgtgaaatgtttttgcagttcaattaacatcatgggcctaacagaggctaagtcttcgcattcaactttttcaaaagtcattccgtcaaattctgcctgaaatttctcatttagaggctgccagtttggcgacatgacttcattaataggccgagggtgacttaatgtataggttaaaaaacccaccaaaatctctctcgaaatcccttcactgccaagtaacatacggacatcaaataagtcgcgaggatgttggcgatccattgcagcacacaatttcccaccatacagatcgggaagactgactacctgaatctcagcataaccaaactcgtcttcaacagactcttgaactggcattatctctgcactatgcaatgtacctctggcgacgggcgacacttcaattttaattgtcgcaaccggacttgatacaacgattctcagttcatcagctttattatcctgaaatgccgctcggatatctggttgagtattgattctgtctgtaatgcgctgcaatgcagccctgacattaaccaaagcctcatctcttggttcaagtggaagataagcaagatcaatatctacagataaccgaggaaaatctctcacaaataaatttatggcggtgccgcctttaagtgcaaaaaccgtctctgtggctaccacaggaagcattcttatgagcaaggaaacctgtttgtaatatgggctgtctttatccattatgttgttcaccttttttgacgcttaatatctctggcactgtgatttgatatcgctcatcaaaacgtcctttttcgacaacctgccgctttcctgcacctaatttaattcttgtttcatctacgcgattgacccactggtgatcgtagtatcgacccagaaatagaaatattcggtttgcctgaacagagctgcttcgttcaagaatatcttgtacttttctaggactaagattgactaaaccctgaaataattctgcgacatgctcaaatgaaatcagcttcccaatcccgtctaccacttcataggcagcaagttctgcacagctgacagtgagttctttctctttaaccgtgatccttttcaaatctttctcgggattcacttcaagcttatgatttccacagtaaaaccaattctgataagggaattcacgaaaccattttggtaaggacgacttatttttaacgcaaatccaaacttgctctttgttcagctgtaaatagtgactcagtccttggtgagttaagctgctcaatccagccaaatgaactgaaacgcccaattgcacatctaatgcttgaatggcatcaacccaagttggctttatatcgccccgcgcatctggacgataatacacgccagaacatagcttctttagccaaccgttctgcgcgtacttttgagccaaggaatagctcacaccgttttcagtcagccattgctgaagtactagcgcaccaggagaagtatgagcaacaagccagtttatcttagatgacattttaacacccaaagtattaatatcacgaacagtataaaccatatagtttattatgaaagtgattttaacactttaggtattaatataccaaatactgtaaaccaagcccgctaatgcggcgttgttgaaatgaaaaggtctacacaacatcaccaataacccgatgttgtgtagacctagtttgattaccttaagtgaactgcctactgtggttcacattcaggtgcccagtaagacggcgctgattgctggaactgttgtgccaatgacttcttgagtgctggcaacaacaggtaaagttgcagacataacactttcaacgactgttggcgtattgtagagacccataccgccaccaatgcccaaggcaaaagccatcaagctttggcgagcgataccgcccacaatacccaccagtaccatggctcccgctacgatccgtcccaaagtaccttgggtccagtcttttagggtatcccacacatcggtgaaagcatcaccaccggtgcccgcaaatgagggctccgaaatcattaacgccattaaaccaagcgcaccaatggtcattaggcgctgagtttgaatggtgcgaactgcatttgtcattcgttagtttctccgtagatactcaagttatcgcgcttaccatcagctcccgctgaggcagaatcgctttgagtctgaagtggacgtagcactggcgaaaccgttcgaggtgctgacaccccaatatcccaccggcgcggttcaatttcggtaaacacgtagctggataaattcagatctccacggtcatcctcccaaggcgcaatccaaattcgcatcacccttgaaggaatgcgaataggtgcagattgctgcgtctcaggtaatgctggatggctcaacagtcctgtttctaaatcagattgtgaatacccagagggagaaccaattcgagtcgccacagcatcaatcgtcttgggtgcagcgccattactggtaagctcatagacttcacgcgcggataaacagcgcacaccgtcaggcatacctgggcatccatattcactactcccaagacccaatgaactacagccagacaataaggttgagccgactgccaataaaagtaatccagctttagaccactgttttgactggtgctttgggttgttctgcattgatgtcgtcatggttaactctcctctggatacacatcttattgtctgaaacggacttcgatcggttagcaacatgcaggattttttcatcttcttgcacctacaccttgtgaagtggccaacgacaacgaggccccacgagtgactatgacttcaattttccttgcagcgtctacctctatgactgggaacatattttcagccatgtccaaatagaacttggccactcgatccaatgctttacctgtgcctttaatcgcagcgccttgtaatgcttcttggctcatgacttgctggtacagctgagtatcaccggcattacccgtctgaatcgttggtacaggattcacatcaaatgcgccagccaagccctgaaggaatccggccatcatcgatttggccaccagctggccttgtttcgacactaatcggccacgaataccggctttgccgtcttcacccacggcataagaatccagtcgcgtttcaatgacgccaccatcttctctcacacatgaaatggtctcgcctcgcaaataagcacgctcagagctcaaatcaccgtaacctgcggcgatcaagaaacactctttgatatccgctctaaatcggttgggtaaaatggcttccttttgaatcctcagcaatgcaggaaaaggttcacgtcttgcggactcgtgagtaggtgcatccaaaccggtgatcaaagtacctgagatgatgctgcccgccggtagatacaaaggcggcgcttcttgcacaacaacctctggttcagcaaccacttcaggctcaatcatacgaatcgtgattggcggcaatggaacatctcgtgctcgtgtaccttggccattggctggctgctgatagagcggatcaggcagcggcgcattggcaaaatagtcgtctgggttagacggcagtggcctttcttctttaggcaattccatggcagataaaggcacttcgaaacggctatttgtgccttcaacagctgcatcacctccagcgcgaacatcatcaagttccgctcgaaggcgagccaactccgcattgacctcacttggtatagaaggcgaacctgggcttagccgtcctgaatcgacgtcacgacgcaagcgctcaacttcacgacgtaactgttcattgcgctcactgagtagttttacgttcgcagccaaactatcgaccccaacatcacgagtattggtatccgtaagaatgtgccggatcgtttcctgccggttacgactgcttgagccatcgtcaggattaggtgaaaacaccatcaccataaggatgagaccaccagcaataccagcaaccgatagaccccgcttcatgttcgggctcatttgctcccattgtgctttcatcgttattcacctcccacaagaagcgaaggtcgctgactttccaccgcttcttcacgatgattgcgaacaaccacatacaactcagtcttttcacccggcaacaagatattgcgtggccagtaagcacttgccactatatctggtgcatgacaggctaattcactggcttctatcggctcatcggcaaagctttcaaccagtcctacatagacggtgaagtaatgtcccgacacaatttgcccctgcttaaaaccaaactttaagcccggctgaaaacatttcgggcttgtgtcagtttggccagctaaacggatgtcatagccttgtggtaactcatttagtgcaaggcgtctgagtaagtcacgtaggttatcgacgtatggctgagccgtttcccaagtggcggcttttcggttcacgacgcccttaataggccactgctgaccatcaatagctaaggtgatttcacgcggtggaatacgacgaggtactaaggtgactgataatgcgggcgcttcctgaccaggcggagtgatgtaaagtgaaaccggtgattctttgtccgtggccacatatacaacattccccttgatttgcgtctgagcatcactggttgttcttacctgaggcgattcaaacggcgtcacaatccggttcagatggccaagtgctacagggatcagttcattaatccccggtgtcatcagcagcgttgttggcacatccgttgaagccgtattggtttgagtcggtggatttgcagtagcagactgcttcatcacactggctggcacaatcggcaattccacgtctgcatacgacgcttgtgataacaggacgccactcaagctaattgcgattaagcttggtgtcatccatcgactaattttggttcgcatcattcaccctccggttttgctcttgggtcaacttttcacgaactcgcttcgttctagcttgcccttcatacgtatccatccagctaagttttggacggtattgctcaatatcgatatcaaactcataggtgcgagtttggcgctgctcatctccagatggtccagagaccaaggaataaccggtcacaaagacatggccggtttcatactcatactccacttgtctgggttggaatttgagcgtgactcggtcttcacggatctgtcttgcctgaatctccagtgcatcgaccacttgctggtacaccgcaggtgaaagtagcggctcgatagcaacccggataaaggacacattgcccggcgtcacgttgcccataagctcagccaggtagagtccccaagattccaggtaaggctgagtggcctggtttcgtgacacttcagccgtttcagacaaggttggtggttgaatggccaccacggtattgcgagaaaatgccgctaccgcaagcagcaagttagatagcaccagcaccgcaatcaggaaccgttgccatcggttctctaattgcgtgccttgccatgattttaaaaacacgtcgaacttcacggcagatagctcctgataaatgggttagggattgtcttggctttggttggcaacagcccggcccagtagatggcgtgaagaataaaaccatctgggcgaccatcacgaaaacgccgatagagcttggttgtcaccaaccccaacaggcataaaaccaaggcattaccggtaaaaatgccgatcactagccccaacagaatgggagccatctcatcggcactccaaagcaggaagtgcggcgggtcatcgatataggacggaatactcacaggttccatagtcactcctcgttgtttgaattgagaagtgaaggatgccttgggattggcaggttcagtggtcagctagatgccgaattcttgaaggttttgagggttctactcagacaatactaacaattgatctttttgatgcggttgatatgatggggatattggtcgtgtcgagaccagctgcccactttagcaaacccggacgggacgacatgcatatcaaatttattttttgcttaggttttttctgcgacctcggcagtgggcaccgtattcgctaataggagaaactcaatgcaaattactaaaatcatttcctctgccacggttgaacgtttaaagcaaaaagcacgaaagcttaaacgtgaaaaatctattccacacactcaagcactcgatgaaattgcaatctctgttggttttaatcattggcatcaggttgtacaagctaatgacgtactgaaaccaacagaagtggcattatcttcaggatgtgtcatggcttttgatgtcaaagatggtatggatgtcgataccagtgatggaattttaattgaagaccacttcttggagatgctcactgaaaagcagctattcgaaatttatgccaattcccctgatgaggacgacgaacaaaacaggccgctaaaagaaacgctatcggattcagagcttcatgagtattttcgagattattgctcattcatgtacttccgtcttgccgagcctcatgcaaacaaaccgctgaaagaagtattggctcttatacgacagtactcgttttggatgccgcaatatatttggcttcaaggccaccttattgatacttaccatttgcctgctgaagacgagaacggcaataccgtaggcgtgaggttttagctctacaagatgaggcctgacaggcctcatatcttcttctgcaagtgacttaacgccaaccctgccatcaatgccaagccgatgatcagcgacggtagcaccaacggtggaatagccagcggggcgaacaatcccataaacagcaaaatgacgcctgagcccaggataatcatgctgtagcggtgaatgatagggctcgaaaaatcaaaggttgttttcttaatcttccaggtcattaagccgtcccacagtgccggtaacatgagtataagcgcaaagggcaaccagaccatcagcaaagcaaatcgagtgaacacttggtacaacacatcaaaaaatgcctgaatacggtcttctacccatacaaaccaaaagcctcccatgttctccatccctttagaacgaagtcgttgttcttctgtggggattagaaaatcacgcacagattgctccatctgcgtatccacaatccatgactgataccagccatggctagtttgaccaatccaatagcttgtttgtgcgcccaattggttttggatcatctgcttctctttactaataacccggccagtccaatcaccaggcactaacacgccaatggcaataatctccagcatcagtgccagacacagcagccaaaccgacttatgcttgctcatgccaaacatcctcttctactcgggccagcatggctgcaacggttggcgtcataatccgggctttaatcacttgttgaagccgctttgtcgatgtatggccactgacataacgcacctcgatgcgtccttctgccagatacgccatccgattaagacgattacgaatccaggtgtggaaatacacaccatccacggcggcccactcgaaatggtcaggatcacgcaggcgaatccccgttaaagcactggcggcagtccaggtcagtgcctcaatgaaatgccaaaggcgtacactatcatcatcacaactgacttcttcataactgcccaagccattacacagacacaaatcaaagatggaatggccatctaacgtgaacgcatccgtcaagtagtccgccaagcaatacaccgaggccaaagcatgaggccagtctgtttcaagcagtcttaaggtttccttgaactgggggttatgttgctgccactgagcgagcatttctttactggtaagtgttgtcattttcagacagacagaatgatgcatacagactccttatgctgcctgtgtagagctggttaaaataggaatgcggcctttgatcacgcggccacctgaaagcttggcgatgtactctaggttggggagctggcctaataactgcggtggaaacatatcgccttcttcctccatcaagcgttcgccatgattgccggtaaacaacgcggggctgtccgagttggacgacataccttgagtttgcataatgtactgcaaccgagtcttaggcagattgtcggtaatgtactgctgcgtttcggcgtccatcacccgaagggctatcaggttgttgatgttacctaacacctggcgagccttagcttcgctgcctgtacgagctgcaaagtcagcaaaggtctgagtagcaatcacgcaacgcatttttgcgccacggcctttgttgagcagttgaatgaagggatcgttgacgacttcagccgcctcatcgatgaagatatttacgggacgattatcaacaccatagttatagcggtcaccggccacggcggtgagatcggataaaagcaacgaaccgatggcgctgccaaccatggcgtcagtcaatgaatccaagccgatatacgccacttgggcattgttgataatacggccagaatccgtaattaaccggctgtcattcacatcgtttgcaatcggtgatagcagtgggccaagttcacttgaagtgagcatattgagcaccggcatcagtgaagccaccatcttggaatagtgggttctgtcatgttcaaacatgctcaaaaggccttccaaatcagtattggcggcaacgggctgaatgcgttcgtagtaaaaaagcagcatcgccatggcttgtttagccaaggtattggccttttcagtaaagcgtttaatctccacactaaagttcggatacacctgctccccccaggctgtgacggcttttactaccaagccctctgggccaccttccaagaatcgtctcagtgttttcagatcaggacgctgtgaagtaagcaacaaaccttgcacgatgttgttcagtgccatttggccaaaggctttaaatggatcagcaccggtttcggatgggattaaggccgcaattcggctggcaatttcagtgccccggttaaagtttctcaggggattaagacgtactgaatgctctggaaaacccggatgaaaatacacaaagcgctcaggactaccggcggcaatacaggctcgctgtgcattatccttaagttctttgtctcccttggggtcaataattatcacggcttcattgcgcaaaatggcctgagtgatcatcgcatcaaagcatcgggtttttccggcaccggtcgtaccaactattaaggtatgcccctcagtgtgaccaactggctggtacacatcttcttctttgggctcgacaccatgaatccaggtcgaacccatttgcttgccgtgaccttggttaagcaaggtttgcttatcccgctttaagatttcataagcacgttgagcatggcgttggtcccactcaaagccataacctaaccacaattcatcaggatgttttgccattaccttttgcaaatgcgacagcgccataaatgccaatggtttgccttttagccccttctgcaacttataaagacggtaagcctcaggcaggcgatacaacgccatgcccgaggaaatccctgtcatccaccaaaatggttcgggcggtaactctgtcagcatttctgcggcaatcgccccagtggccccaaccagccaacctgctgctgccatggcctcatagttcgtgcgccagggcatttcgtatgcgttttctttcattcatgctccgcaaaataaccgtttgcaatccacttaagttcaaatggattaacgtttagcgtgagcggtaaacagaaccgtttccccctcatcaaactggcattcgtcactggccgagatcccccgaagcagctgtccggctggaatgccatgcgcattggcgacttggcgtaaggtttgaatcgtgacgcgaataccatcggcactatgatccacgtctgggtaatcaccatcggtcagtaagatgggcaaatctttcacaaaattaaccatctgttggcgctgcacgtatttggggtctgtactcgatttcgcattgggcgcaatcggcttttgctttcgctccgctcttgtggcgggctcttttgcttgggcattagttgtcttagttcgactcggacgctgtaaagcctcttcgttctgaattgctgtcgccggttctgtgtcttgtttggagatgtctatcagtgcaattagccttttagaaatcgataccttcagaagtaacccttgctcctgaacgccatcattcgtagtcacagttctggccttacgagtcgggtttgcaggatctagttcaagccagtctaatcgactgagttcagcaagcagttttcgaggagcacaccaaggccttactgcatcgggataacggatcaggacttgctcaccaaccacaaccaacgcactgctggcctctgggagccacgccaaagattcaggtagattcaatgctgcttcgttttgctgatttacgttatctgcgatagcgccatcatatgaattgttaggcttttcgcattcatcacctggagcattttcagttgcctgggggttattaacatcactggcatgacgaagttcatcatcttgttcggacgagtttgtcgatggtgactgtgccgaactactatgttcaattgatgatgacgcttcagacaagcctggatgctcactggaacgactctgaggctctgcttgtgtttgttgtgttgcttcccactcaggtttactaaacagtgtcacaccacttggtacattcgagctgaacaataaatcggtctcagaaatatgcagcatgggtaaccagattggcttgtcgtctttgatcagcacttcaggggcaaggctttcatatcgctcatttgagccggatttagtggccaatcctctctcaatgaggatgtccgcaagggtatcgggatctcttgggatgccaggtatcttgtctttggccaaaagctcaatgatgtccttagccgcgcttttccagaccaggtaaagattggttgattgattcgattttcgtacccagactctcgcatctcgctgattgaccaaccactgggaactggcaagcaatcgcctcatggcatcaagtaaatagcgttcgactgggacaccaagggcattgtcgtcaacggaaattcgttgagctttcaggtctcgctggacactggtttggtcagcttcaataaccaatttagacaggacatgctcgggatcggtattgccaattgcttccaacatggcttgcaaaatctcagggcccggctgggttaaccaggcgagcaactcaggtgtcatcacccggtttaacaccagaattgaaaattgctcgtgccgcttgcaccgtccgtcgcgccagcgaatgaaatagcgttcaatgcggttattagtggcccactgggataaggtttgtaaaaaagggttccactgatagcgtccatcttcgtctgtgatggacaaatctgaaacaggcttaccaatatcatggaacaaaccgccaagagccgccgcaacacgccaccttggttcaagctcttttttctcaaccggtgtgccactggcaacaaagatgatcccttcagcagcttgtgccgcccagaaagcaacttccaaagaatgacgtaataaaccaccagcgccactgtgatgatgatgctcagaagctggcaacaaatgaacataagcagccagatgatcaatgcagggctgaattagcctttgaaaatcacgctggttaaagccaagtatctggcgcagtttggcaattagctcgtcttgtgtggactgcaaatcttcaggtgacgcagctggcaaccccttcaggaatggcgggtagcgtggaatttccgcatccagttgtgatgacagctctggaagtgctttggcttgaaaaaataggtttttgaacatagggaacctccgacacgatagtgtgaaggttttctatagctacctgagtcaaaatagataataaatttatgcaactattctccctttacttggttgttgaatagaatggaaaatcactcatatggcctttcgtgagagaagtactccaccacatacaggcgagatatccaaaacatggcttcacataccctatgtgaagcacaattttaaacaagctcaaattgatatctgggcaattataaagataactaaatcaagtaagggcttagttgtcctgacgatgtaacgacgagaccctttattgctcttgttgcagcaacgtgtaatagcgctctttcgttgaaatcgtaatcgcgtttttcgacaggatcttcggtaatagccatttgcaatgggatgacaccttcgtttgcgcctgcaatgaaaatatattgaaactcgagccctttaactcggtgcatcgtagcaaaacgaagccctggtttatcgttgtcagaactctctgaagagagcgagtaagaatcgaatccagcttgttcaaaagcgcttttgtagttgtcacgaagtgcgttcgttcgcgatacaatacaaatattcttcaacggcacaccacattcaataagcgattctatctgcttgcgtatgaagccacactcctcatcgaaactggtacacgcttgcacaattggcaaatcaccatggaaaagagataaatagtcactcgatttatcaaagtcaccatcaagatcatcgactggcacattttctaaaatagctgtggcaaatcgacgggtttcctcagtggtacgatagttaatctttaacttttgagaacgacgtccacgaacattgatgccgcaacggccaagtaccaccttattgcgataaatgcgctggtggccatcaccaacaataaataggtcattctcttgttctggcacgatacttctcagtagcgtgaaagcttgactccccatatcctgagcttcatcgacgatgatcgaactatatggaagaacgagttgttgctcattaatgagcgccatcgcgtctaacatcgcatcattaatttctcgaatttgatttcggttaagttggtttcgatattcttcgaaaacaggccaaacgagagagcgctgcaaacggctcaatgaggtacctcgcccaacacggcttacctttaaatactcttgcttggttttaatcccatttgcttgaacaatcaggcgccattcttcttgataaaaagaatctgggaaatacggctcggcaggcgcttggctaacagcgatatcccaacatttttttcgtttagcatcaccctcatacactactttgtagtcatatttaaactgcttcaacagacgagaaacccagccatcaatgttgacgacttcaattcgtgccaattgttcatctgttgctatttttttgatgtttgctttaatatcagaggctaaatttttggtaaaagtcgttaataagatcttacgattactctgttctaaaataagcttcttcgccaaatggacagcgcgatgcatcgccactacagttttccctgtccctgcaccgccgagcactcgggttggacctttagcctctagtgcaaccaactttcgttggcttgggtgcaagaatactcgccattgttccaacggtgcattaagcatcttttggagttcaaggtcatcggtaaccactttgaaagagcgcagagtaacggctcgttgcaacgccgcatcaaagtcttctacatcaatctcaacatcgccattaatttggtcgttataggtgttataaacagattcatagtcgtctccagcggccaacataaacaatgcctcaaaggcttcagttggcaaactctcttccaactgttcaagttgtttctcagtcgcaattgacatcacacgttggataaaactttctggtacaccaagcgcgagaatttgcttttctttaaactgtgcaaaaagtggtgagttttgcgaagaaatcccttgtgtcggctcaacaatctcagcttccacattagaaacatcaataatctgaatggcgcctgttgacgggtgaatttcgcagcgatgagtacgagcccaatcataagcatcatcatgcaaagcaacaaacatcaacatgtaaacgttgcctttttctggtttaagaacaatgcctcgataagcttgatcgattcttaccgaatgcacattcttacttttcgcatcacggattttttcataattaatcgcagagcttgtggggttttcacgaaacttgctcaaaaactcttgcaccttcttttgttgtgctttgggaatcgcagcaaaagagagcaaaaaatcggatgcaattgcaatttttggagtatccatacctgacattgtggttacctatcattatgttttaattttaaatttagctgctcaaagacggtttcatttaatgcgccaacaatgacgaaccacccctttgattcaaatagatctaccgcctcttgctgctcaggcaacaacaaggcaacttgactactcggccaagccaattctgcctcagccaaaatttcgccttcttcgcttgttaactcatagccaacctcaggagcactgagggattttgccatcatcgcttcaataacctccggctctagcagttgatgctcaataataagctgccattcttcatccgctccgcccaccgaagatggcgaatttacggtaacagaggcggtttgattcggcatcagtgtaccgtcattcacgtcgtcttggagcagtacacgggaagtgcaggaaaaatcacgcataaactggccgatattcaccagcttccaaaagcccgcgaggtacgcttcaaagtgctcatcgtgaatgtcacgatcatcaaagcaaatgtgcaaacgtatatttgcttcaacatactcgaaaggtgtttgacctttcactgcatctttcagcacataagcatatgactcaacaggaaaaacagttgcaatttccactaacctttgtgaagtgccaactgaatcaagtaaaccaccgaacagatatggcgtatccatacagagttcgctaaagcgactcgaggcgctattttcacgcatttcgtattcaaacttcgctttcaccgataagtctcgtgacttattgaacgctagccaatagaagcagttcgccgtcgaagcttgacggaaaaatacggatgtttcgatgggttgatgtaaccattttttcagcaaactaaagttattttccccttcataaacgctgcgcaatgtttggtaattacgctcgatgaacttaggatacaacgcttctttaggttgaatttcttggcgatgcaaaccaaaaaactctttcaatttactcttatcactttgaacaatatcatgccagcctagtgtccacgtgttatagcgcccgctatcacgcactgcattacgcttagctacatcgtcaaacactatttttttgtggaacgcgaaaccatcaagataaatggctaaaggtttcacaccagccatctgagatgcgggatacaaaacaaaatcaggacgagtttctatataaacgccgtcgtttgaaccgagttcgacttgcggaaccaaatgccaagagacatcagagttaatttttgacgcgataaaccaagacgagcggttatggaaaaactctttggttaccacaaactctttggcaagccctttcaaggtttcaataaatagccgttcaagttcagactccactacgccatcaatttcaatatctgaaacgctcttaatactgatcagcttgtctttattatcgatgatagctctgagcaacttacgcgcatgttcacgggaaattgagcgcattttgttgcgatcacggtaagcataaacacagtggtaacaaccatccttaccttccgaggcgcaggcacaatgttcaatgacctccagcgccatcgatagcagggcgattaggttgtcaggctcctgcattaattctttaagagcccctgtacctccaggcactgaatcataaatgactaagtaataacgatagctttcacctgcatctgccggttctttataaatcgtgccttttagatgatcgacactgcccttaaagtattttttcatccccaattgcaacgcagcagccaaagaagactccgtgacttcacctaacccatagttactcacgggcaacaaaattcgaatggcctcagattcaagctcgcgataaagatacaaaacgtcctcataacgcgcctcttcaggagaatttcggtatttacaggcgatttcgtgcgttggttggccatagtttttttgtacaaagccacagtcactgcacaccttaaagcctgttttctttttcttctctcctgcaacgtagaactcttccccttcatcagatgcactaccaaagttaatatctcgcaacgtcactcggtttaagaattcaaaaccaaaaggcatttctttattaggaatgtggtaagcgtaagcgacatcttgcggcatgaagttcaccaacatttgtcgttggaaaaacgctggagtacgagtgtcagcatcgtcagcaatttttgagtcacgcgagctagaacgcgcataaacctgtctgagtttcagcatgcgaattttctgctctgcatccccccaaccggaatggccacatttgggacagaaagaatgctgatcggcctcaatgcgctcactatagttacagtggctacaaactcgccatgtctcaggctcagacaccttcatgtcaatttgttcgatttcaactttatgcccacccgcgtaaaaatggctcgttggtgcaagctcagaaagcgcggccgctgccggacgctcgtactcaaaggtacgtgtcacgtattggcttgagccatcttccgtttcaatggtgtcctttttacgccaaagcactgagcgaagcgtaacgcccgcttcagggaatgcatagttcggcagtaagccctcatccgtcataaagttgagagtatttttcccgttaatctctcgaatcagcgccaacagcgcattgcgctcgttttctaactcattgagttcagattcaaaattgaggtctttaactggcgacaacttcaatttatcaatactacgtttgagtttttcggcgcgactgcgcaacgatttacggtcagtcgccaaatggctcaatgactgctcaattttgctttctaagctgtaagcgacattactgccaaacataaaggcacgtaacttatcaactgagtttggcgataggctgtggaaaatagagatgaagagatcaaacaactcctgctgtttacctttaacaaaagtgaggaaattgtatggatatagatcgcgctggccactttctgtcgcatccaacatctgttttactcgcttaggaatcgcactactggtcacacctgttttaatccaacggtccatacaaaacgccgttaactgacgttccaaaatggccgaagcatcaagatagacacccggtgcagtgacactgcccgccatcatttccaatggttcttgataataaaaaagatcgtgcggattaccttctgcgacagtcatgttaaaggcattaccgtcctttcgccctgcgcggccgatacgttgtaaatagttcgcttgcgctggtggtactgagcaaagcagcactgatgacaatccaccaatatcgatacccatttcaagcgtcggcgtcgaggagagcaagttcacagcccagcttgattgccctttgataaatgagttttcaacttgttcacgcacatcacgctcaagtaagccggtgtgttcactggcattgacacggtgtgtttgtgcaaaatgccactctttttccgcaagcggcagatcgcgcgtatagcgcccttgacagcaatcattatgacaaggttgagcataccaactggcataggcagttttagcgaccaccaaacgttcggtacaacggtcacaaccgattgcttgtaaattggtcgtcagcttaagactttcaggttgcaagccccagacttcactacctttgacatcaaattgaacaatgatgcccgctttgcgtagcgcatgcattaatcggctataaatcgtctgggtatgcgaggagatcatcacgttgtgctgattacccaaacatttgttaagccaggtttggtaccaactgtggtgatgtttagaaccaaacaaattatcaaagcgttggatcttaccaaacgacaaaaattgaggggtgcgcgttctgtcactccagttgggcataaatttcgaagttaggcggtcaattttagttagatagtaggtttcgccagcgtcttgaatgtagtgttgtaaggctgaatgatttatcgcccctttcaaacgcatgcggtgtagtacgcccaaacagaaatgcagcagatgttgatcgttcactccgctgaactcattccccagttcatcaaccagttcagcatgcagctttgaacaaagtgcgaccaattcatcactgcacacatcgacactcacctcgccagtgcgctcaagggttcggccaatcgctgctcgcaagccaaattctgaatgcacttcccaattaagtcgtttcgccactaaatctggcaaattgctattggtgggtaatgtggcggcatcgtttccttccaccagctcgcgataatcgtttaaccattccatattcggcgccgtaaacgttgcgacaaacgattcaggagtcacgagtttagcttgggcttcttgtgtcactttcgtggcgaagctcgccagatcaagcccttcaaattgctgcgcaacggtggcgatatgtcctcgcaccattaacggccaagtacgtgcagcaaagaaacccgctcggtgagcggcgtcttggaccgagtcagagaaggtgatgagttttttattgtcgttgaaacggctagcataaagctgattgatagcaacactcgacagtgtcgcggattgcgcaccaataatgctcaggccatttttgctatgacaataagggcactgattgtcaaagtgtgggcctttagtttcggttgtttttaccaaatctgggataaacacacggatcagtgcgtcttgctcatgaccacagtggatcggggcgctgtccgaatttaaggttaggcaggttgggcaaacgcgtcgaataagccctttggccggaatatcttcaccttcgttgatggggaataacacgcgcacgccttgatgacgagcgaagaacaagcggtagaacacctccaaatcgttctcgagctgatcgctgtagccatcgccataactaccccaccctgttgcatgacagtcacggcagtggatcactggcatatgttgctcgccttcgtgaaacgccaaatcatcactaaaacgcagcaccggcttcggatggatttgtgccaccaaacggcgtagctcgcgcagccaaatttggtaacgcacttgcaaaaatggcagcacggggcgcgctttgcccagtgcgattcgttcttgctcgacctctggcggttcatctatccctcggcgcgctatcgacaccaaagcaataaaactctgcaacaactgcaacgtggcttgatatccgagtgacaaacttcggtcgagttcattcaccagcacatccagcgcgcgaattttgccatccagcaatcccagtagtgaatggaaaaactgatgtgtaagcagagcctcccctaatgcgatgcgcacggctcgcccttcatccgaatcgagatcgtctggcaaggctaagttatgctcgggaaaccacagcgctaactgctgatttaaataggcgacttcatcggcgaactgagaggcatcaagcaacgagagctgctcataactcggtgagttaaacacttgtgcttgatgagcctgtaaatattcatcgtggcgataacggtcttctcgtaccacggcgctttcatcaaacggtgcatcaaaaatggtgctggcgtattccagcaatggggctaaatcatcaccgacagtcgctgaggtgccaacacacgcaaagccttggttatccacgcttaagtggaactttaaacggcggatcaaacaagccaagtccgaaccttgagcgccatcaaaggtgtgcagttcatccaccaccaagtactttaatgtgcccggttggttatgtagccacagcgattgatcttcagggcgcatcagcaaatagtcgagcattttgtagttggtgagcaaaatatcggggggggtattgcgcaaatgctctttgctggtgatcacgccatctttactcatgacaacgctgccttgaccatcgccaccgccaacaaacaagccgaccgtgactttgccttttaagcccgcattgttgtacaccgtttctgcaaaacgtttagcttggtcagttgccagcgcattcatcgggtatatgacgatcgctttcacccccggctggttgcttgctgcacagtgattcaaaatagggtaaagaaaacattccgttttacccgagcccgtgccggttgcgaccaaggtggcctgtgggttgtcaccaccaaggcgctgataagcaaccgcttggtgtgcgtagggcggaaaaggtaagcgtacttgcgaaaaaaaattcagcgccagcgcgctttgccgaaaaggcaactgaatggataaataagggcctttgaccagattatcgcgctcgtttaaaaagctatcgatcatcgagttatcttcgctttcaaagcatgggctgttcatggtaaaggcggattttacgtattttttgacgctgcttgcgacttggtcactcaccactgacggtaacatggtttcactgtcctttttgcattgttttttgcattcttttctcgcgctgttttctcgcggcgctattttctcacgatggtttctttcgttattctattggctaaatgcaagtgattcggcggttcgagcgccgtggtcgaagcctcggcgctcttgcctacattattcagcgaatgtctaactgagcttcaactaggcaaaacgctcactaaacaccgcccatgcggtttcgtagtcttgctcacggtcgcacttgtcgaatggggcgatgtattcaatagtgcgttcaaccggcccgccgggttgcgtgtcatccatgtaagttttgtaaaccttgccggatttcagttcgcgaatatcttcccaaccgagcgctacattgctctgcgtccacggctcggctgcactgccctgcccgctggttttatcggcaaacacgccatcttcaatcgagagggtaaacccgtttttcttattaaacttacggtctaaacctacgcccaccaaaccttttgaggcggtaaacacaatacggccagttcggtcgtaccaagtatccgcctcgtattgacgcattactgggaactgaacacggtagatggttttgagctcttccaaagtcatacccaacgccattgctaccagcacatcgatttcaactaaggcttggcggcgtgcgtaatcggtacgtagtgcacaatcgcgacgccattctgcggttaggtttctaaaaaaacggttgggaagacgagaatcctcttttgcccaagtttcattctcaaactgcgctttaaagcacttaccccacaactcttgataagctgttgttaaagcaaccaaagctaaagagcgcaaatgaatagccacgcgataaatatcatttgaaagaactggtagctgattgatcaacgttgtattagcatgccccattcctgtacttttaacgcggtaatcgattggaacagataacgtcataccgaaataatccaacaagtcagcatggcgtttaaacaccgttcctaaacaagtgtttatatggccaaccctttttggaattatcgttgagatcattgttcgctccgaagatggccctatcatttcacgattcacaaatcgatagtaatctgtcacgggtcttggctctggcatttcttccggttttgcacccttttcctgccatgcggccaaatcggcttcatctatccaaggtactttgggggtacgtcgcagatattctgcttcatcgcaagctgggacatagttggtacgagggaggtagttgtcaggtatcgtttggagatcgacaatatcgtaatgccctttttcggtacaaattgctcttggcgttttatagactggcgtgcctacataaaaatgtgggccagataacacaaaactacctgtgtgatcaggatgacaagtctgtcgttctattgttccgtctttttgggcgttcacttcgttccagtgttgagtggtaacgaaactttttcttatacaggatagttttttcggctgactggctaatttttctaaaacggacagtaattgggtagaatgtaaagcaggcaatctggcttcaagcgaaggggttccttcttcgtcataaagttgagaaaacaattttagtgtatcttgatcaataattaataagcgatttttatgcccactctcatcccagttcccctcatcattcttaattcctcctactattcctgagccattatggtggattgataagtctaatgtttttggtaaaaacaagttagacacgttgataaaatcgacggtgtcattctctcgggatgtaaatatgtttacgctatacttatttcgatgccctattggaaatagcatatgttgattttgaaattgagcatgtagccgcaatcgtttataaatctcagctctcaacctaccaccattggggtcgtcatatacaccttccggatgcaacaatcccgctgtgccatttttacttccaatagaccaagatagtggtaaaaaacatttatatagattcgctttactacccttgagctcaggatagttcgccaaactatttagaaagttttgtgttgctgatgcttcttcatattcagaaaaatacgcatgttctagcgcaggcatctgtagcagcatttcttcacgtagagtatttagcttggaagcggaaaacttacgcaatacaaattgtggctcaaaatcacccataatgccgctttcttgccattccactctcaaccaaggtgggttaccaagaatcagatcaaaaccgccgtggtcggcaaaaatatcggcaaattccagttcccaatggaaaaatttatagcgcgcggccagcttatccaccagcgctaaacgcgggaagaccatatataagaagtctttattgacggtaccgctgttattggtggcaaacagatcttgcgtttgagactctgccatttcatcgaacatacctagttggccagagccagattcaacaagattaagacttgctgtttctgcatagccttcgagtacctgctcaatttcacctaggtattccgcgcggcttggcagatcatcggcactctccattggccaaaaccacagcgcacaccagtaatccatcaccatttttaagcgcgggtaaacggctgaacctgactgctgtgattgactcagtaacttatctttatcgttggtacttgaacgctgtgctgagcgcgcggagtttggccaaatttgcaggttatcggtggtgatattgcgctcttttcggcgctgctcaacatgcgcttgccatagctcatcaattttttggcagatacgttttagctgatctttttcttccatgctaaacgagcgaacaaaggttttgcgccatgcattgatggtggcaatttctgttggcttaagcgcttttaccactttatcactgtagtttgccataccgttatcgggcagcaggtagtgataaacctcatgcggactgcgcgcttcattatggcctaaacgttttggctcgatgtttaaccagcttgggtctttggcttttgtgtaagtgaggtcgccagtcgaaaacacctggcggcgtgcgccaattaatgagttaccattgtaaagctgatagccaaaccaaggtacaaaggcttcatcgctaatggcgttaagccacagcgagacttccgccagctcgacggcgacggggtttaaatccacaccgtaaacgttgttatcggcgatgtacatttttacccgttgcagctctcgggtgtattgctcttgcggtatacgggtatcttctgccagttgttttaactcaaggtacttttcagccagctgatttatcgcttcgttcaagaacgccgcgctgcccatggctggctcacacactttgatggtgaggattttatcggcctgttccgcaacggttgcgaggggttcgagctgctctttatacagctctttcagcgcatatttcaccaatgactgagtgagcacttctggggtgtagtacgaggccgatttttcacgatctcgccccgccatgcggtaaataaagctgcctttcgggtggctgagtaaggtgccatctttgcgaaataccttttcatcatcttggtattcggccaactgctcggcactgacaaagtagcctgtttccagctcattgagctcttccccagcttttttcacttcatataagtcggtttgagcaaaaaagccacggtaggaaagcaaggcttcatacacggcgcccaactggttaatccccaactgcgcgtaagagatgcggccacgacgcttgcctttgccttttcctgggcggcttaacgacattaacttgatcacgcgctgtaaggtttcgttacgaaataccacacgcgccaaatacggcatacgcgcgtcatcgaataagtgactttcaagtttgcggatggcaaaacttttctgaatatcatcaaataagctgctctcgctatcgctctgtttgctgttgccagcaaagcctttggccacgagacgaaatagcatctgcaagctgtcgtgaatatagcgaccattgcgcgattcttcggtagagagatccaccatttccaaatcgcgtagtgcttctaaactgtaccctttgaggtagacatcggagtttgtcggtgcgtattttagctctggccttgcttcgatatagaacaaaaacagcatgcgatacatgtaccgtaagcattcaaggcttagttggctggcatcaatgttgtttttgccgtcgtaggtaaaccctttttcaatcagctgttttgcggcttcatcccccaacagctcaatggattcacgcagcgcgtacttgagatcttcggatactgaaaacgcatgcttgtgtgagctttcatctaaattatccagtaggttctgaccttgctgtgggcagatggaatctttatgcaaaagagcagccatcgctttgagagtatcgctctctttacgaccaagaatctcttctaaatcaaaacgtaacaaacggttttgcgcccacttggtacgatctagcaacaagcattggcgattgcccaataacagcaaccagcgaggtggctccggggcgctaaagatttttttcgaaattaagtcctgccaactcagctcatcaccttgctgtgtttttaatagaaccttacgctgttctggttcgagtgcttctaactgctgtgataacaggggcaatgacagtgggtcagcgcagtcatccatggatggatcatgggcttcgaggatccataacagaggcaaaccttgatggtcttgataagccgacaaaaccggtagctgaccgttttctagcaagacttgtgttggttttatctcaaacccgagcgcatgcaagatggggctccaacgcgcacgctgattactaaggcgtttgttgatgtctttaacactgagatgctgatttaactcgcgaaagtactcaccgctataacttgccagctgggtgtgaggtgcacgatagccacgctgcggtttaccaccttgctctttttccgcacgttcaatttcgcgggcttggttttctttttctaaccactgttctaatacaccacgaatatcaccgacaaacacttcgctcagataatggtgtgagtaaaagtcgttttcgttgtaaataccaaccaatgccatggttatagcccttccgatccggttaatactgccaccagttgaatgtatggtgaggtttctgtggtcatggtgtcctcgatccagcgtaaatattcatcgaagatctgttcaatttcccgttggcgctgtgcttttttgtcattaacgattttttctgcttgcttgctatcgccaaagtccagctccaattgcttcatttgcttatcgcgtaacttatcgagtttttccatctgctgattgagcttttgatttaactcggcttctttttcattacgaagttgtagcaagtatgggcgtactgcatcgatcgcttggcttaaaagcgcttcttggcgctcgtggctgcgttcaccgcctttattagacagcacttgctggtggaatgggtaacgctgaataaagtcttcaaagcgctcaatgcccgtgagttcaccgtcctcaaaactgaccaccaaccatgggttgactaccgggtgtgatttacggttcggaaacaagccagaaagcacaaagtgatcttcatagctttcgaaaagtgcaggcatgcgcagcactggcgcttggtggcgaccaaacgcgcccatcattttatcgcccagccactgtgaaaccgggtttatcggccagagatattggattttcggccaagccgtttgctcactgcgacaacgtataatttcctggttaatcacatcaagccggttactcaaatagagggtatggttgttctcttctttgggctgtatttccgtaggtaagaatttaaaacgctgacgcaggtctttaggggcaaataacgaaacaacacctttgttgtccacttcgtatttgagcttttgtccctgctggttaagatacttcagcgcgtgctcacagtaatcgatatcgtctttaaacaaggaaacagcttgggccgtatcatcgccttcttgcgcattggacacgtcgtttgcgaagcctgcaaacaggtcttcttcttgctgctcactattttggctgtagaagttgtcaatccagtccgcagggtcaaagctgatgtcatcgctcatcatctgatcagcaatttgcgcttcttcttcttcttgagaatacgcacgagtaaactccgaactatcaccaatgtttttctgcgcctgatcgtctttattgatcagcacttccagtacgcgggtatctccgctaattcggggattgtcgctttgcgttagcaggtagcggatttctggctggtgtttctgtccatagcgatcgatacggccattacgctgctggaaaaccatcaacgaccaaggcacatcaaagtggaccattttgtggctgaggtgatgtaagttgataccttctgatgccacatcagaacagactaataggcgcaatttcgagttttctttgccaaactcctccacgacgctcatgatatccgtgtctgacatgccaccatgtaactgggcaatagctcccacagctaaaccaaaatcttgctgcagattttgatacagaaactctagggttttgatgctttcggtaaagatcactaagcggtcatcggtttggcttttcttccactgaagatctttttgcatcgtcgtaagtaactgttggtacttgctaaaactggctttatcgacgttgcgcaaagcggatgcgagatgttcaagctcattaatgtcttcttgataatcgacatcactagtgttcttaagcttctgttctaatttttttatgcggttttcaacagtagacaaacaagccattgggctggaaaacagtgccttttcaagcgttactttaaatagtttggtgcctttgttacccgactctaagctgcgcagcgacatttcgactaagcgacgataaacctcttcttcttgtgcgctggctttggcatagactcggtcaatgtgccgttctggaaactcacccaccatttggtctttgacgtctttcttaaaacggcgcaccactagatttttatctttaaaatcgtcgtaactgtaatcactagggttggcaatggcggttgcgtccagcatgttcatcaagctagcgaaactttcagccttgccatcgtgtggcgttgcagaaagcatcactaaggtatcgctacgacgagccagtaatttggctaacttactgcgctgcgagtgtgaaccacgttctgctacgttgtgcgcttcatcaatgactatgatgtcccagtatgcactctctaggtaatggcgatactcgacatcttgcttgagcgtatctatcgagataatggctttatcgtagtagtaaaacgggttgtgattagtggggatgcgattgcgtacctgctgaatcccggttgaatcaagacgtgttaatggaatagaaaaacggctccaaaattctttttggaactgcgtcaacattgatttcaccgctaagacaagaatacgcttacctttaccacgacgaataagctctgacactaaaatgccagcttcaagggtcttacccaaacccacggcatcagcaatcaagatacgttgacgaggctgctttaacaccattttgatcgggtcgagctggaaaggtaatgggtccatcgccgctttatgaccaagatgtactttctcatctgttggcacccgttggcgcagcatactttcgatgtataacttggaggcgctatagcccgaggagtcatcctctaccaatagggtatttttggggtctagtatttcaattttgttttccaaactcgtcaagaatcgcccttctcgaccgcgtactaactcggaaatcccttcacaggttatcagcagaccaccatctgaactgctgtcgactttttgaattacccattcagcatcgcgtatcacaatgcgcatgccgggagcataattgacttgttggtttatcattaatgttcctttaaaagaaaaacatcttttccgttttttgtgtgcttggcaacctgtgacctcataggcagtcatctaagaatcaatgatttactcaccgactaacttgtaattcccggagctagcatgatgtttttaactccataaagtgttgctctgttctttaaatacaattgagctccaccatctttgagtgtggcgttggtagaacaatccacattccattgtctgagtaagtagcctgccgatgccgctctaatctcaacctttagaacgccccccgtcatgccataatccagctcaatcgcttcgctgtgctcaatacgtgggtgcggcactaactcaagttcaacaaatctgttccattgccggtcttgggtttcaagttcggcttcagacagcgtggagtcttcaagcacagccgctgctttaattcgggtcagcacaaagtcacggaactcgccatgcttgcggtcaaaaccacgaacatgccaacgcaggccattgtccaccagcgtatgcggaacaatttcacgcgttgtttcaccactcgataacgacacataggtgatactcaaggctttgcctttgtgtatggcctcggtgaccttcgccactatcgataaactcggcttgttaaggtgataaggcgcttcacaagccaatggtggttttaccttgccagtgaagccatctccgtatccttggctaatggttgccagagttctcacaacgtcgtactcgaacaggggctcaaaagcttcaccacgcttatgtaatttgagcttttggtcatactcaatgttgcctggcgcaagctctcgatacattgtgaagtctttcgttgcttgtgcagcggctatgctgaagcgatcgactaaatcagctcgcaccgcttcgcccttaaacaataaagtgaaatcgatgtgggcaatgcgatccctggttgcttgtggcaactgcgctatctgcaaaagcctatctggcttcgccactactgtttgtttcagaccatcatttgtcatgcgtcttgtttatccaattcaaccagattcttaaaactctgtttataaagtacggtcagacatcgcgtaatcacattgaatagtgtcactcaatgctgctcttcatccgcaatgacttaacaatctctaccggttgaagctggacagatggccataaaacactgaataggcttcaacctaattaattttattaggtatcatcctatcacaaattattttgtagggaagactaagcggcaactttttgatctggattgcaattgccgctcaggtatcggtgtgaagaccttgtttcgtgtcattggtgatagccgagttcaatgcgctacccgaaccagtggcaccacgatgttaccgcgatgagatacccctttgtccgtctttgtagacatcagggctcgttgctcactctcccgaatgcgcctggcaacttctgcctgagctggtagcaatggcagcatcccttcagcaatcgcgtccggtgcagattcttggccacaggacatcaagtgcttccatggatctttaagaaagcgctcgaacgtgatgccaaattcaatgatgcgggcagagacgaagatttcgccccagtattcaatgtaggtgtcttggtacatggaaagattcctctttttggttaaaccatgagttcactttccattttccagaggttttcaaatatgcaaggcttaccttgtagagagctacaaagctttaaatcgattgcgggcatctttgtagtcatagtgggcatgttctgagccacgatgatacaaatcatctaggtaagtttgttcctgcggcaactcgtcttcgctgatttcgcgccaccaatgtttgttggcacctttcacaccgtcatgccagcggtaaccacgctcttttaaatagtcctttacgtcaaacggcgcaccaaacgcacgaactaatacagttcgcctgtctgcttcagacaacaagtttgcaacggactcgggcaacaaatagaacaaccaggccatcgccaaacaatcggttgcagctcggtgtccttcatagaaccaacctaagcgaagcagcaggtactcaagctttctactttcaaagcccagtgctttccaatctatgccactggctgaacaggcccaagatagatggcctaatgcagcaaaccgattttcaaagaaaggacgatcaaactgtgcattgtgtgcaaccaccagcggatcatcggataaccaactcgctaccagtgaatcatcaatgtgctggccttgaaccatatcatcggtgataccggttaactcggtaatcagctcggggattggcttgccgggatcttcatacaagctgatcaaatcaataatcgacacaatccgctgagcagaggggctgtaaagcaccttaaccataccaagctcaataatggactcatcatcggcagacagtccggttgtctctgtatcgagcagcaccattggctgttcatcaccgaccataggagaaagttcaagtggccaggactgcggctcacgcgttaatggaatacgctccagcaatctaaaatcttctggtctttctgggatatccgcgaggcgctctagcggaaatggcgcaggggctcttgtcattgatggttcctcttcaattctattgttcgctttaggttatttcactgtgccctgtccgtttataaacgcatttgtacaaaatgcacattggatacctcagcgtttttttaatctttctactgggtgaccccatgtatgaaggctttgactaagcctttcggaaagccttagctaaaccgtttaggtaacccttaccgataccctttacgtatggcttagccaaccccttttcaaacggttgcaaaaggcttgaactaagttcgactgaacattttaaagatgctcatgacttcgctttaagccagtaaattcaatacgaagcagaattttactaactgtttttaaaccctttgcaaagggttcaacaagccttgtttgacggttacttgacccatgcgttaaccagtagcagtaacaggatcagtaacagaaacaagagcagtaggcagaagcagtattgtccaagccttgcaggctttgacgagggcgagcgatcccccacatctagtttttcatcacaaaaaagaaatcacccacgacacaacgtcttactcgaacaactacagttttacctacaattttacttgtagaaatcagcatagcattagatactgtataaataaacagtatcaattgtgattttttcgaggttcgtcatgagtgtctcgctgatatgccgtagcggcgcacttgccttcatcaaagccaagcgccttcgtattccattgtttatggaacgtgtttctgctggttttccctcaccagcgcaggattatgttgagcaaacgctcgacctcaacgagctgtgcatcaagcgaccggctgcaaccttctttgtgcgtgttgaaggtgattcaatgattgatgctgggattcacccagatgatattttggtggttgatcgatctgtccaagccgaacacggtgacattgtcatcgcgggtatccatggtgaactcacggtaaaggagcttcaactaaggccgtgcgtcatgctgatcccaagaaaccaggcgtatgagcccattcatgtttctgaagggacagagttagagatatttggtgtggtcaccaatgtggtgcgaaacatgcgccgcaagtcgtgactatcccatgccagtatttgccttggtggactgcaacaacttttacgctagttgtgagaagctgtttcgtcctgatttaaaagatacgccggttgtggtgctgtccaacaatgacggctgcgtggttgcacggtcgcgtgaagctaagttactcggtattaatatgggcgtacccgtctttcaaatcaaagctgaaatgcagcgccatggtattttggcattctcgtctaactatgcgctgtatgcagatttaagcagtcgagtgatgcgcactttggaagagatggcaccacgagtagaggtttactccattgacgaagcgtttttggatttaaccggtattgagtctgtcctatcccttgtcgagttcggacaacaagtgcgagagcgcataggccactggattgggatcaccgtttgtgtaggcattgcaccgactaaaacactcgccaagctggctaaccatgccgccaagaaatatcccgccactcaaggggttgtagatctaactaatccagatcggcaacgtcgattgctcgcattagtcccggttgatgatgtttggggcgttggtagacggctttcaacgcgattaaatgctctgggtatcaccacagccctagacctcgccaatgcctctcctagagccatcagagaccagttttcagtggttttagagagaaccgtcagagagctcaatggtgagtcgtgcattgaacttgaagagatcccaccaactaagaaacaaatcgtctgtagccgttcatttggcgtaaaagtaacgcaatttgaattgttacgtgaagctatatgcgaatacgcaacccgcgccactgagaagctacgcaaagaacagcagcaagccaaagtgatgaccgtgttcatacgtaccagcccctttaaggacaacgagccgcagtacagcaactctgcatcgggtgaattgctaatcccaagttgcgacacgcgggattttatcgagctggccagtcacttactcaagcggatatggaaggatggttttcgttatgccaaagcgggcatcatgctgtctgacttttacgatcctggcatgtttcaaccaggactattcgatgacgtatcgacccgctctaatagccaacagttgatgtctgtattggacaccattaatcaaagcggtgccggaaaggttttctttgctggacaaggtacgaagaaagattggtcgatgaagcgagagcatttgtctcccgcttatacaacacgctgggaccaattaccgcgagtgaagtagcgccgataattcagtaggcattcactctgcgacgcagcatgttgagcttatcaacttggcgtcgaacatcactgaagaactcctctttctccatggccagcgctagctcccattctttggccaaaccttggcagtccaaaaatgagtatctcagcttcgtctttgagatacgcagccccttgctaaagaccacgcgtttgcctcgttgaccgtgaaaactgttgatgtaccactctatgccaaagccatacttaaagtctctgatacggacaccaagcagaccccagtctttaaagggctcattctcacgaaccttgtaatgggtaacccaaaagtcatcaacttcagctcgtgccagcgcttttagcctgtccgtttcttgctgaagtaaatctgatacctctactttccattgttcattgacgatttctaccaaaccaatttccccatccaattaaccccaaaagccaaaaccactatccgtttggcttttggatcgaaacgccaaacgtaaaactgccgtaacaatcactgtttggcgtctcgatataaatcaactcgcgcaatcccatacctgacaagggatacaatccgatttcacttaaaaaagcctgaaaagacgtatcgccatgaagatacaaaccgtttggcgagttcaggccagaatgcaaacgacgtttggcgtctcgatttttttggctcagtcatccgccgcaaaacagagcctattctcatacttttgcgaaaatgcaatcggcagatagatgaaaggatttgtcacctttctgcccaccgccagtgcaccgaatcctgataatgacatttgagtgaaccgccagagcacttggaaatgcccaagcgtgaacagcgcggttgattgaaaaccgttagagcactttgagtgcacaggagataagtatgtttgtactaggcgtagatatcggttactcaaacctgaagctggcaattggccaatcaggcaatgaaccgaaaaccattattctgcctgcgggtgccggtcctgcggatcgtatgccggagcgtatcggtggaggcgatgatgaaacttgtttgtatgtgtctgtcgataatgagcgttgggccgctggtgtgcctgctggacgccttcaaggctgggaacgagagcttcacccggaatatcccaccacaaaaacctataaggcgctttttcatgccgccttgttaatggctgaaacagaatccatcgatttggttgtcactggattaccggtttcccagtttcatgaaccacaacgtaagtctgaccttgtgcagcgtttaaaaggtgtccatcaagtgacgccaaagcgcagcatcaccgttcatgacgtcaaagtgctgccgcagcctgccggtgcctatatggatctggttcaaacaggtggtgatttgggcttgattgaagaaggtcgcgtcgtcgtcatagatcccggcttcttttctgttgactgggttgcccttgaggccggagaaattcgctacagctcatcaggaaccagtcttcaggcaatgtccgtgctactggaaactattgataagctgatttcggaagatcacggtgccaaagtaggtatggatcgacttgaaaaagccatgagaaccggcgacttgcaggtcctgctatttggagaaaaagtcgatatttcaccttatctgaatgctgccatgaaaaaggtagcgccagttgctcttacagccatgcgccaatctatgcgcgacgaaagcattaatgcggacttggtattgatcgccggaggtggagccttggcttataaggaagcggccaaggagattttttcacgaagcaagattatcgtgccggaacagtctgttttggcgaatgtccgaggcttctggttttatggggcatgatcatgagagttgtcgtcaacattcccccagggagccaccctgaactgctcaaagaattggaaaagacgccaccacgggaacgcgctgagcgtctgcggatgctggccacctttgggttaattcacatgagccaacccaatctatccacggcatctgtaccggtggatggccatgcaccagatggtgaagtgacttctatgagtacagcgccagaacccaaagcagaatcacgtaaacaatcattaaaatcaaaactagggatgggcttataacatggcgttatcagttagctggctcgatgccaggttaaataaagaagcaaaagaaaccgtagtaaaagccgaccgagatgggctaagtgctcgggtatcgcccaagggcaaaattgtttttcagtttcgttatcgattcgatggcaagcaacagcgggtagacataggtacttacccactaatgaagcttgctgaagccaggaatgagctggataggttaagggcggtactcgaccagggcagaaaccccaagctctacctacagcaggaacgggctaagtattctgccaaccaaagcttcgaatcgatttttcgagactggatagactctgccggtaagcaagggctaaaggagaaaacgtggcacttccaaaaacgcagcagtgaaatatatttgctgccccgacttggcaagtacccattaactgacatcaatgaactgtccttaagaaactgtcttcgtgaggtttcggagtcgtccccttcaaacacagaacgcctagtgtctgtactgcataagttctatgactggctgattgatgaacaaattttggaaattaacgctgctgctgggatcacagcaaagaaggttggcggtaaaaaaggaaaacgaactcgggtgctaaatgacaacgagatcaggatactttggcgctatttgcatgagtcaaaaatcactgagaagaaccgcatctacataaaattgcttctgttattgggaggccgtaagggagaactcattcaagctgaaaagcatcactttgacttgcaatctgcaatgtggacagtgcccatagagatccgcaaacaaggtgagaaaattggagcgccgatcatgcggccattgattaagccagctattgagctgattgaactggcgatgcagatgagcaaatcaacctacttgtttcccgcgaacggacaagaagagcttgccacaaatggctttgataccactattcctaataatgtgaaaatctgggctcgcagatcgcttggtattgagatggaacactggtctatgcatgatcttcgcagaacgatgcgaacgcgaatgtctgccatcacgacgcaagaagttgccgagttgatgattggccacagcaaaaaagggttagatgctatctacaaccaatatcagtacctggatgaaatgcgtcatgcttacgacgtttggtatcaacagctagaaaccatcatcgaaccgacaggctttccattcaactggcgtttcggacagtaaaataaaagaaagaggctcagtcctctttcttctcatactcctccaagtcttcaatgtgccacagcttgtttcgtgtatttcggttgatacgaggttgcggcaagctgccatcttttattcttcgccagagcgtcgtatagctaatgtggtaacgagccatcacttcgtaagatgttagaaaaggggttatctggtgcgctactgctgtcatctgcattctcctgaaaatcaatgtaaagctatcatcgcctgattcatcacttgttgatggtcagaaagatgcatgatttgttcagaagatcagccttatcaaaacacaaatgttgctattaggtacttttcagctcaaacctatgaataacaagggctacaaggcggtttgtgtcatgaatagcaatcaacatgcctaacgtgaaaaatttgtacacactgtttgtacactcgcaacgatgacacatcaaaaaccacaatgacgaaccgtttaaattcataagcttacaaacataaaactagagatgatcgcatttattccgcttttgtaatgtcgaaaccaaagtaccaaaagcagaaggtactttcttcatcaaacccagtaaccacaaggcctacagccagatttgtgtcatggaattttcgccaaaggcctctaaaacggaatttgtactcaagtttgtacacactttccgaggttacgcttgaacatcattgaaaagcaaagaaacgagaaaaagacaaaaagcctttaaattcagtacgtagagatgtgattgtggtgtgcaatgaaaggtggttttaagcgttgaaaggctgggcggcatcagggtgggaaataatggcaaaagttctacgacgagcaacttcttgctgaaaaataggattagacatcaatagtgatcttctagttgataaacaagtgaatgcactgcactgagatatttctataacgacttattaaagtgactataaagcacattcacccgtaagttaatcttagttggcgcttattttcgcctatcttggctttataaacaatcaatggttatctatttattctcagcattgtaccaatgctctgttgtcgttgtttgtaatcgttgtttttttagctgatgaacatccttttaatcctccccataaataaagtaaacaaatttgatcctttttagtgtcatttttgtttacttgattcacaccaaaattaagtatacagttatgacatgtttaagtgttatttttgataactaaaggtgtattgtgaaaaagattgaggcaattaaaaagctcttagaatatgacaagcgcggtcgctgcgtttttactaattcagatctggccaacatctttcatcaagataatgaacgagcattgcgtgcaggaattaaacgtttgcaagacgatggcttactcactaggatcattaatggtgtgtacttatacaatttagcgcagtcaaaaggcagcgatacgttggagcaaattgctaaaactattcgacgtggggaatataactacattagcttggagtctgccctttctgattttggtgttatttcgcaaattccagtagatcgcttaactgttatgacaacgggacgttccggtgaattcaaaacgcctttgggtacaattgaatttacacatacaaaacgagctccaatcgacattatagagaataccactttagtcggcagaccacttagattagcaacaaaacaaactgcatacagagacttaaaacgagtcggccgaaatacacatttagtaagcaaggaggaactatatgaaaattgatcaagaaaatttcgcgctattggtgaataaagcaatgcaggtcggaaatgtatctcacatgcgttccgtgatagagaaagaactcttacactacgatattttatttgcgctagaaaaaggtggacttctaaacaaactgacttttcaaggtggcacttcattacgtctttgttatggtggtaatcgtttcagcgaagatctggattttgctggcgggaaggattttagctcagcaatgttggcagatatgaaacattgtatagaaaaatacattggcgaacgatacgggctagaagtaacagtaaaagaaccaaaagatctaaagcaagatcctaaatattctgaattgagcattgataagtggcaaatagcagtagtgacttctcctgagagaaaagatctaccaaaacaaaaaatcaaagtagaagtggcaaacattccagcctatacaagagagccccaacctctgcaaataaactatgattttttgcctgatggatacagtgatatgctaattttgacagaaagtttggatgaaatcatggcggataaaatcatttctttgccagccactacaaggtatgtccgccaccgagatatatgggatttagcttggttacagcaacaaggcgcgacactcaatatggacttagttaaaaataaggtatcagattataaacttgagcacttcaacaaaatgttggaaaactttctcgaacgacttcctagtattgtatctagtgaagcattcattgcagaaatgaaacgtttcttaccaacagatgtatttgatagaaccctcgctcaggataagtttcaagtttacctgcaaaatactttggcgaaactatttaaaactgtgagtaacgaattactaggcaaggtcactaatagtgaatttagaatgtaaattaataaatggctcaacttgatgggattcacttcagtattttcctatcttaataggctttttataaactaacgataaatttaagaactaaagtaaacatgcgttttacttattttaacgcccttcatattgtctttattattctcacaatatgttttactaaataccccttgtaactaaagtaaaattatttaccaaaatatccattaggtaaaatttaaataaaagaataaaagtctactcacttcacataaaataaaaaaagacgcctaatagaagacgtctttaatttaacttaaataagtatttaattagaatttaattggataagccatgattatcgcatcttcttttcccgttgctgttggataataattcttacgtacagatactgaattaaatcctatagattcatagagattagatgctttttgattggattctcttacctcaagccataatgtagcaatatcttttctttcaatattatcaataagttctaataacaatgcttttccatagcctttaccttgataatcaggatgtatcgcgatattaaaaagcgttgcttcatctaatattaattgcgtaatagcaaaacctaccataatattatcaatgcaaatttttagattaaaataatgatcaccttggttactatagaatgtttcttcgctccaagggaatgaatgacttagtttttcaatttcccatgctaaaggtaaatcagcagggtttaatggggaaatggtcttcatgttgatagatttgtttccaaagatcgcgttttgcattggcatcaaaatataattgatgtaatgaagggcttctcagagaagtatattgagcaggtagagtgatatcagtacctaatagccaacaggctggtgtaaatgatcctgtgagcaggctcacatcctctgaggtaatacaatagatttcacttttatctattcccatagtgctaaaaatatcagagaaaagcccgttatttagatcaacaacatcatcagtaatgataagtaaacgagtggtatccggaaattgcacagaatgttcgccttttaatacagcaggcttacgaagtacccattgacgaattccaagttgggctaacattctgtctttacggctcatgatatttacctatcaagtgtagaacaacggtacatagtatcagagggcataaactacgccaataaatagcgtcagtttctttatatctgatatcatgcgttttatgttttttaaggagtaataatcataatgtcctcattgtcccctgccagcgaagttattcttcgtcatctagatcatttcgcagacaggcacgtactcatagcaggtgatcttcaagacacgctagcatcacaaattcaggccaaaagtgttagagcctatacaaatcaatatcaccagtggctaccgctactcaaatccatgggtgataatgcattttttggtttagcggcagatcaatcattcgtaaaatattgcgacactttgatttatttttggcctaagaataagaatgaagcaacttttcagttacgtagcttatgcgcaagtttatctgtcgggactgaaatcttcatcgtcggcgaaaaccgtagtggtgtaaaaagtgctacggaattaatgaatggtatagcaaagctaaaaaaaatagattcagcacgtcgttgtagcctcttttttggttcactaacctatcaaacactctttgatcgaaataactggtggcaaacttatcgttatgacgatttaacggtgatggcattacccggtgtttttagtcaaaccgcattagatgaaggcagccgattattactctctacatttgatgatgcaatggtaggtgacttactggatatggcctgtggttgtggggtgattgccacggtattaggcaagaaaaacccgatgttaaaactcacactctgtgacgtcaatgcagccgctatttcatccagtattgccacgttaaatgttaatgaattagaaggacgggttattgcaagcaatgtctattctgcggtagaagaaacttatgattggatagtctctaatcctcctttccatgatggcttaggtaccagctatcaagctgcagaagacattattcgtctcgcgcctaactttttgaaaaaaggcggtaaactgcgtattgttgccaatgctttcttaccttatcaagatattcttgatcacgtgtttggctctcatgaagtgcttgcatcaacaggtaaattcaaagtttaccaagcaaccaagaaatagtaatcaccagcactattataaaaaccgccagtaattgatttttcaactactggtggccttcggtatttacttcctttttattatcagcaggttatcatgcctttatttacggttatctacccatgataggttaaaaaaaaggtcattaagctataggtgatcacaacgccggcggggatcatcacccacatttgtaatttcttatgaaataacataatggtagatagcaacatagaaataacaagaaccaatgtaaatgctgctgttcctgcaatagagtgggtgatcacagtaaataacgaagcaacagccaacatttcccataaactaatacgagatgtccaagaagagacagaggagatacgtgttgatttagccatgagagccaccatctgttaatgataatgattttcattattatataacacattggttaactcaatgtctatcaagaaaaaaaagtagccatacccttaattttaaagaggttaaacaaaaaacgctttaccgctgccaacgataaagcattttagagtcatcaaatgatgatgtaaaataagtgattaatcttctttattaaaattaagcactaaatgaatatcttcaggctctctttcataaagctcagtatcaggcacatcaattaaacgacagcccatatgctgataaaaattaacactattttcagaaggcgttgaggatatatataatccgctagcccctttttgcttcgcatattccacacaataatcaaacaatatacgggctaatccttgcccacgctgctggtggctaatatgtaagaaagagagctgtaacaaggtgttatcttggcctcgccactgtggatcaacactggtagcagcgactaacttgtcatcttcaaagactccccaaaaaggggcaccgcgctcagcgctttcaagtaaaacaggggtataatgttctgcctcaccttcaggccagcctttcatatcaaaacgctgttcagataacaccagttgcccttgttgtaaaacatatagcctttcaatcaattctgttctatcaatttcccaaacgcgagggatttcattatgtgttaatagacgaatattttttttcattgttgaagattaacctgttctgaagaagatccgctccgctctaatgcgtggtaagccactgcacagaataaggagttcaaccgtttcatatcacccaacaaactggtatgcagcgaactggtttcaatactttgcatattatgcaaatgaagacgttctacatgagcaaacgagtaacgttggttgagtaaacggaatcgatgttttgctcggcgtaatttacgcgcatgctccatattgccggaaacaaacaccgacatcgccagattcagattactttgcagacgctcaaggagtgtctgtaattcacgacgtccttcctccgataaatttaagtgatgatctaaacttttattcaccacctcaccagacatacgcgctatgatagcggaagattgttgcaaattcatcgcggtatcaataatttctgcccagcgacgagagtcttcagtaccaagatcatgctgctgaatttgtgccatatacaatttaatactgctatggagcaattccacttcctcttctagctggctaatctcccttttttgcagacgatccccttccattaaggcttgaaaacgttgcaacatctgttcaaccacatcccctaaccgtaatgtctctctgactgcattagcaatagctaaagagggagtatcaacggcggatggatctaaataacgaggtgcaacttctgtcccagtaacgggtaattccggcactaatttttgacataatttcgccattggccccacaaacggcaacatcaacacacagcgcactaagttataaatcacatgaaaatagataatcacttccgcaggggaaaaatcatattgttggatttttgtcgcaatgatggtgatccacggcaataccagcaaggcgccaattaatttaaaaaacagacttcctatgacgacttgacgtgaactaatactttgaccacgactactgattaatgccaacaatccactaccaatattagaaccaataacaatacataaactaatatataaaggcataaagcctgttgcacttaatgttgcggtaagtaataccgccgctaagcttgaataactaaccatcgcaaaaatagcgccgaccaatagtgctaaaatcgtatccccgctcaaagaggtaaaaatagcttgtactgcactggcatgggttatcggctcagcagaagtcacaatcagttgtaatgctaagataattaaaccaaggcctattcccactctacccagttgcccgatacgctcttttttacgacttaaaaaagtcatgacacccaataaaatcagtaacggtgataaccacgaaagatcgaatgtcagcacccgcgccattagcgctgtacccacatcagcccctagcataatcaccaaagcgggtgtaatagaaataaggccttgagtgacgaacgaaatcactagcaatgccgtagcattactactttgtactaaggcagtaacaccgacaccggcaagaaaagcattcgattttttattaatacttttacctaaaattcggcgtaaatcagagccgaacacacgcataataccggtgcgaacaatatgtgttccccagactaaaagtgccacggatgagagtaaatgaagcagtgttagcatagaaattagtcaccttattttttatcgttgtttattggctcatttctccttcaatgccataaaaaagagagagatcctacgcagataaccatatctgaaaaatgatttttatagataacgccctaatcaaaacgacgttattaggcaaaaagatattgcgacttaagtgcaataatcaatggagaagttaagaatagtataagaatatcattgtaaattctgttaattatagcaaacaaaaagtaactttcaaaattagactgtaaataacgtcttgatttattatcgttttcttattttttgtaaagaaatcatagaaaaaaacgcgacttgagggtatctctctaagtcgcgtgaaaatacaacaattttagtaagacaattcaactacatttcagacagactacaattcagtcaccttatcaaggttatttcaatcccatcgcatcgcgcatagtaaagaaaagatctgtttggtctgttaaccctacgacattagcagcatgtggaccataagcggcaacgcgtaattgcgcgcctgtatgctcttgtgaatccgtttctgagttaccataattcaccaccatgacagcgccatctttggtaatcaatgcttgtgttaagccgcttgatttcacatcagcttcaataatttgactagagtgagcgtgatctgcggtcactataataagcgtatcaccattttgtttagcgaaatctaaaccaatttgtaccgcttcatctaatgccaccgtttcaccaatttgaccacaaggattagcattatgatcttgtttatcaatggaggcgctttcgacttgtaagaagaaaccattttcattcgttttcagcaaatcaatcgcttttttggtcatttgcgctaatgttggtgcattcgggtctaattttgaattcggtttacactctaaaggaggattctttaaattaccttgataagtggcttttggcccttcccaagcgacggccatattaccgtcatgaaatagacctaacacaggtttatcttgatttgctagcgtaatcgcctctaacgatttagcatctttcacaatttgatagccacgctctattgcttgttgctcgagcgttttccctttatattcaccggccgttgctgtttgagcaaaacttttcgcgcctcctcccagtgtaatatctgcacgagtcactaacaattgctcagagattgaacctctaccgccattttctagcgcattcgttgagcattttgctaacgtttctacaggcccataacacttacgcccggtaacatgtgaaaatagcgcagccggtgttgcatcttgaatttcagaggtagtgacattccccgtcgctttaccattcgcttttgctaattccaaaatcgtttggtgatctttaccaaacacatcaatccctaatgccccattataggttttaacccctgaagcccatgctgttgctgatgcggccgaatctgttacataattaggtttttgtgtttttctatctaaagaataatgagtatattggccggtcatcggtaacgcatcaatccctttaaagaagccaccagccccttcggcatagttacgtgctaccgttatctcagaatcccccatcccatcaccgataaataggatcacatttttagcttgatgattattaagtgctgcttttaatgcttcagtttgatctgaggttatacgacgagcaccaccaaattccgtaatattaccttttgctgcgcgatcttgcgccaaaatagtatcggcagtgacgggggctgcaaaagaagagaaactcacgcttgtaaagagtgttgcgacgactacagataacgcagaacgttgataacgtagagacatagctttttccttgcacgcaaaaaaataaagaattttggggtttatgttttaagtcacaaagagcttacgagagtaaaatgacaaacagatgaaagaaaaaagcgatttagatgacagctttatggcaattgacatcctccacgccctaaaggatgtggatccctactgcgttcagactgatgtctgaatcacctcggcgggttcctgcttcgacgggcggtctgactgccccctccctccactggcaagcacggcatgtcctgccgctaaaatgttacgtgccccgttgatatcagcattcgctgtatatccacattcaaggcactcgaattgactttgtgacgggcggttttcctttgctgtatgaccacagcaagcgcacttctgactggtgtaggctggtggtattgccagtacctgacctcctcgccagagctgcttgtactcaagctgacggcgcatttcataccagccctgctccagtattgagcggtttaaaccagatttagcttttacgttccgtccaggccgttctgtcgtaccttttgccgatttagacatgttactgacctttaagtcctcaatgacaatcattgcgtggtttttgctgatttcgctggtgactttgtgaaggtagtctttccttatattggcaatatgagaatgcagacgttgaattttgcgcttttgtttttgccagttggcactgaatttgattttacggcttaatttccgttgaagccttgccagctttcgctggtttactttaaaactgctgacgggcgggtataccgtaccgtctgaaagcgtggcaagttttgtaacgcctgcatcaagcccgactattgaggttgattcaggttgtggttctgtcgcttcatactcagtctgaatgctgacgtaccatttaccgcatgactgactgaccgtgacgtttctcacttctccgacgacttcacgactgttgcggtagcgcatccatcccaactttggcaatgatatacgactattggattgatcgagcttcacgccctgcgggtagcgaaaagcctcatttttaccgcgtttcttgaatcgaggaaaagcggtacgctgctggaaaaaattcttgtaagcccgttccaaatctttaagtgactgttgtaacggttgtgatggggcttccttcaaccattgtgtctctgtgtcagatttccactcaatgagccatgaagccatttttgtatagggaatgtatttattccctgcttcgtgctcctcattctgacgtgctaatgcccgattgaaaacaaaacgacaagcccctgcaaagcgtctcatctcacgctcttgctgaccattgggtcttaactggaatttaaaggcttgtagacgtttcatattacctattatactttggtccatgaaaaatgaaactaatattcgccgtggcagacattgtgtattcctgatgcacgtccatttggtctttgtcacaaaataccggcgaaaaatatttgatcaggatgcaattgaaaaatggcgaggctactttgccagtgtttgtgctgattttgatgttgaactggttgaaatggatggggaacgggatcacgttcatttactgattaattacccgccaaaactggcgatatctaatctggttaacagccttaaaggggtatcgagtcgattacttcgacgtgatcgtcctgatattgcccaacgtgattactacaaaggggttctttggtcgccgagttatttcgcggggagttgtggtggcgcaccaatatccattatccgccagtacattgagcaacaggaaacaccgagttagttaaaaaaccgcgccttatatccccgacctgaaggacggggttttacggtgctttggataaatgacaaattagcctaaagaaaaaggatgtgtagttcaccaccactcacatccctttaagataaaaaagatgaataattaatcgttagttaacgctttagtgccgatataaagcgcctcacaccaagagatataatcatgcccgctcgccatctcgagcgattgcacaggatagcccctttgctgtaaaacctgctttaattggcgattattatttaatattcctccagcgccttcgcgagactcaaataacccagcctctaagaaaaactgtaatggttttttatccgcctgttgatattggcgaattaaccactctggggcttcgttttctggcgcccaccaataagagccggacatactaagcactttcccaaagcgatcaggacggttaaatgccacccatgcagaggccaatcccccatagcttgagcctgagactatagtttccttagcggctacttgcaggcctttctcttgctctaaccaaaccaaaagttcatccgctaaaaagcggtgaaaatcaggattaggtggtaattcaacactacgacgatcactatcaatactatcgacaaataagatagcaataggaggtaatttcccctcttcaatcaacttatcaaaaaaccggtctatgccatattgttggcgataaatttgtccatcaaatagcaccaatagtcgcggtgtcgtcattttctgtgcgggtaaataaagcgcaatctctcgatcattgtttaaaatttcactatgaaaacgactgattgatgtattgccattcattgccctatctaagatatctggcaactggcattcacggggataatcaagtgacagcaatgaaaagtaattataacgatcgtccgctttacttggtgaagggtgaagattaaaaggatcggcctgtgccgtcgttaaaatagcacggcgctgctgtgcagctgttgcattttcaatgactggcacatctggtgctaatttatattgcattaatgtatcgttaggcacgatataactacgataccaaatatcgctattggctaaacgcgttaacggatcatgatcacctgcaggcgatcccaatagatatacattagattgcgcaccttgccataaaaaagtcacgcgcttgttatgattatcgtaaggttcaacaaggggagttccctcttgctgtatctgttgccagaataactgtatattgctggcggtgagatcttgtgccagcatttgcaatctagggctagttaatgctatacccgcatctttatctaaaggctgataagggtatgttttcagtgtgatatgccactgtaccccaacttctccttgggcaataaactgataatttgccgtttcaggtaataggaagcgtatcttttgttgttgtccatcaacgggcacatcttttaataagcgacgaacatgagtgccatcttggtttgctaattgtagattttgtatacctttaacatctaactcagcataacgctggctctgtaaatgtgtagaaaaacagagtgccttatcgtgattaaactggcctgttatttctttattttctgttattgataagcaattggcgaaactagaaaaagaggccatcaatgcgcagatcattagaggagttctcactgtattttctcattataatttaggtaagaacttatagtaatgataattgttatcaattcaataaggatttattggtgtatgaatttgatcacttagaataataaaaaactccacaatcttttggttttcttgtggagttttagtagcaaaataatattcaaagggtctatcaacgctcttctaatggataactacgaaagctccataatcctaatgcttttaagccatcgcgataaataccttgtaaatcagattttgatgttttttgtaattcagctaatggcttatcgggggctacaaccgttaaataggtgatatcactggggccactttgccaactcgcaaccgtaaaaatagcatcagcacgacgaacatgactaccagagctaataatcaccgctgttttaattcggtgtttagttaatgcataacggctaaataacgcattctccaccgttgagcgtgcataattgtcttggaaaattcgctctgcgggaataccttttttaactaaccaatccgccattaatttaccttcagtttgatgtgctttcggcacaccacctgtcacaacaatcattgcatcaggtaactgttttgcgacttcaagggttttatttaaacgatcaatcaagatctgattcatcgtaccatctggattaagtgcataacccaatgtcacaatggcattatttcctttggttttatttagcgttgccaaatctgctggcgttaacttatcacttaatggcattttgcttacacgatcaatttgagcaaaaaagcggcttagctcttcagcttttgccggattaagggattttaacttgttaaaataggcttcactttctttatctttaccttcaaaacgcgtccaagaagtcacataaattaatgcatcaatatcatccggtgcggcttctaaaatttgtttataaatcgttaccgcacgctcaatttgattgttatagacataagcactggcggcactaaatagtaaatctaagcgataaggctctaacttataagcttgttgtagcttttgtgctacgacttccatattagaaggtagttttcccgtaaatccagcgtcagaaacacgcgctggcgatttaaatgcctctaatgcatcttggatcaacatatctaccgtttggcgctgagaaatatattgctgatagctattatcgggttgatggactttttgataagccaatgcagaagaggaagccgtaaagcctaaagcagcaatggctaatgaaataactgtttttttgatctgaagtgaaatacgggaaggttgcgccattatcttgtccttttgcgaaaataaatctgtttcttcaattggttaagcttatgaagacaaagtgtgtgactcctcacacttaagagaaaaagaaatacacaccgatatatctatacctaacttttatcatagagatctaccattaatttgcagtaatcattttcactaatttgaaaaaaatagcattattatgctaatcgcttaatgaacagccgtttttatccatactttaggtttaaacaaaaatttcattcttattgtgactatatagctagctataaataaaaaacgccaattaatggcgtttttaaaaatacttattcgatatgctttgattgcatcatcagcaattccctgactaattcgacacaacgaagaaagcgctcatcataatcaggaggatctactttgacatattcaatattgtttttatctaacatctctatcaacaatgtttgaaaacgacggcgctctttatcactccctaaactacgtaaaccatcggcaacccatggcgtattgttctctagcagaataactaaatcaaaacgatattcatcaatcaatgcctgtacaaaaggatgttcttttccttcataacgtaaacaaaaagcctgtgttgttacaaaatcagtatcgataaatgcaactttattagcatatttaactgcaaaatcaatatattgggcatgacctaaagcgattttatcataatcagaatactgcaatgccatttcgtctcctcctaaatgagagaagacataatcacggccatattcccacgcactggttgtattaaaaatattagcaagcttatttactaaggtcgatttgccactcgattcaccacctaatatagccactgtacgcacgaaaaaaggttttacttcggtaggaatatattcccaatatttaaatggcgcttgacggatttgactaccgctaatattcataaacgagcgctcaggatcgaccagtaccgtttcaatacctaaaaatgcttcatattgactggcgtcctctcgttcactggtatagataaaatccggcgcgatctgtttttcttgtagaaaggctttgataccctcactccacatttcccaaccatgaggttgaggctctataccatgttcattaaactcatgaatacgaatatttttctgatacttaaaagtttgtaataaccagcgcaacctatcacttaccgtcggctgttgtgacatcgcactattgataaatagctctttatcacgaggttcgtcatgacataaaatgacatgcaattcatccacttgactacaagctcgttgaattaaataaatatgcccagtatgaagaggatagaatttaccaaaaatcaccccaatggttttctgttgtaatggatattctaatcccaaaaattggtgtaatgcggacattttttgtgcactggggcttttgattttgttattaataagctggctaagatagccctttgtcatctgactttcatcggcaacttgctgtaaggtatagccattcttttttattgcctgtttgatataatcaaaagatcccatgatttactcctttagaagtcgtccaaatcatcaagtacagataacgcatctgatagtttcttcactccatacactttcatatcaggtggatttttctttggcatattcgcattaggcacaatagcacgtttaaaaccgtgttttgctgcttctgcaattcgctcttgtccacttggtacaggacgaatttctcccgcgagtcctacctcaccaaaaataactaaatcacgcggtaaaggacgattacgaaaactcgatactaatgatagtaataaagctaaatctgcactagtttcggttactttgacaccgccaacgacattaacaaagacatcttgatcagacatctgtaaaccaccatgacgatgcaaaaccgctaataatattgctaagcgattttgctctaatcccaccgcaacacggcgaggatttgataacatagagtggtcgaccaatgcttggatctccaccagtaatggccgcgttccttcccaaaccaccataacagaactgcctgaagtcacctcatcaccacgacttaaaaagatagccgatggattactcacttcgcgtaaaccttgttccgtcatggcaaaaacacctaactcattcaccgcaccaaagcggtttttatgactacgcaatgttctaaaacgtgagtccgtttcaccatcaagcatcactgagcagtcaatacagtgttctaatactttaggtcccgctaatgtgccatctttggtgacatgacccaccataataatggcaatatcattcgttttagcaaaacgagtcagataagcagctgtctctcgtacctgtgccacactgcccggggaagattgaatatcggccatatgcattacttggatcgagtcaatgaccattaatttaggttgctcttgagcagcaattaaacaaatttgttcaatactggtttctgacaacatattcaattcggttgtcggtaagcctaagcggtgcgcccgcatggcaacctgctgtaatgactcttctcccgtgacatacaaggttttcatttcagcggctaaacgacacatggtctgcagtaatagtgtacttttacctgcccccggatttccgccaattaaaatggcacttcccggcacaacccctccgcctaacacacgatcaaattctttaaatccagtagaaaagcgaggtaatgcttcaaggctaatttcagagagcttttgaacacggcttattcctttcgcatctccggcaaaaccgctaaaacgatcgttacgggcagaaggtgtcgccgcaaggcgcacttccgtaatggtattccacgcatgacacgcagaacattgtccttgccaacgcgggtaatcggcaccacattcattacatacaaaggctcttttggctgcttttgccacactgctctccccgttattttcttgactgaaaacttatcgttcttcgtgctttaatcctgcacttaaaatacacatcacacccattaaatcagcatgacgaatagctactttggcttgtgcatatactttaggtttggcatggtaggcaatacctaaacccgcctttctaagcattttaagatcgtttgcgccatcacctatcgcaatggtttgttccagcggtatatctaaatctttagctaagcgtgtaagcacttgcgctttatatttagcatcaacaatagggcctttgactttgcccgttaatttaccatctttaatttctagctgattagcaaccgctgcaactaaacgtaatcgctgttttaggttatcagcaaaataagtaaatccccctgatgcaatcgcaatttgccaatccattgcctgaagcttacgcactaaacttgttaacccgggcatcagaggtaaattatccattactttttgtaaaatattcgcatcagctcccgctaattgtgcaacacgcaattttaggctttcactaaaatccatttcaccttgcatcgcttgctccgttatctcggccactttatcaccgacaccggccagtttagcgatttcatcaatacactcaatttgaatagccgtggaatccatatccatcactaaaagtcccggagagcgtaaacgtgggatctgcccaaagggtacaacatctaaaccacattcatcagataaccgacgaatacgacgggttaaacttcccgcaatacgtaccacttggtaatcatcaatacgccatgaagaaaccaccacaatagccacacctaatttatgctggaactcacttattctttttttatcaagttctcgtccataaagtaaccatccgctatcgcctgcacgataatccagtggcatcacttcttcaccactgagtgatagcggtagacctggccatttacggatctcatccggtaaatagcaataggtcagactatttgacatacttattctcctgttttcccctgtctgaacaaaataattgttattcagcctattctatctgtgattcatctggcaacatgcacatacttgcttacgcaaaaggttgaacatgcttaaagataaactaaaattcaaactacaaaaaacagcgattatactgatttgtatcgcattattggcttttttgatgcaaggcgcctcttattttagccgtgcaaatcagcacgcccgtatcacccagtttgaagagcttgccaaaacactggcagaacaagttgccttctcattatccaattatatggatgacagtagcaaagataacgtaaatccacacattatagctaatttaaatcatctaactcacgatagtcgggtactggatgcaagtctttattggcaagatggcacacaaatagcgcatagtggtgaaaatgtgacggtaaaagagcgattggccttagaaggacaaaaaagtggcggttcttttaatcatcagctggtggtgcctatccctggtcaagatcagccaaagggttttctaagattgacgttagatacacaccaacttgtcacagaatctggccaagtcgataacaccactaatttattgcgtgtgatgctattggttgctctggcgattggttttttactgtcccacagcttattgcaattaacaccagtgcattggcagcaatcgccctatttattaaccgcaagtttacccactcgtcatgaaaaagaagatgatgaacaaaaaagtgatcagcaagaagaaacagaaaatagatctgaagttaaataacactgccacaaattaacataataaggtgagtcattagtactcaccttcatttctttatttctatatttctatctaaaataggtcaaattattttagatatatctaatttatacgtattttcgtgctattcccttaaactttgaatgggctttgtttaaaatcacagtaaatctcagtcaatttattaacctaatgcgataaataaatcttacatctttcttttgctcttgagttgctgaggtggttatgactgaacaatctgttatccaacgttgtcaacaaatcgtagaaaatccaaccctttcccccgaacaaaaacgtcattttctagcattagaagcggaaaatatgttgccatacccgacattatctaacgaggcgagccttgcgctaaatgaacgggttatctgcgatatgtatgaaggtcatgccccttataaaccacgttatgtattacctgattacgcgaaattcttagcacaaggctcgcgctatttagagcttgaacctgcccaagattttgatgatgcgctaaatatgctgactatcctttatcatcatgttccttcagtcacttcaatgccggtttatttaggtcgtattgataaaatcttactaccttatgtggggaatttgacgcaagagcaactctatccaaaattaaagcgtttctggcgctatcttgatagaacccttcctgatgcctttatgcacgctaatattggccctgaagactctatcattacacgtttaattcttaaggtagatgttgaacttcaacaagtagccccgaatctcacctttatttatgacgcggcactaacaccttctgatttattgcaccaagcaatcaccaatatttgtcatagtagtaaaccccatattgctaacggtacattgcaagatgctgtatttggtaaagatgaatacggtattgttagttgttataactctctaccgcaaagtggtggcggtagcactttagttcgtatcaatctcaaagaagtagcaaagcgcagccaaaatagtgccgactttctagagaatgtattgccgttttacatgcaaaaacaaatcgagatcatcaatgctcgttgcgaattcctctatgaaaaatcaaacttttttcaacaaagctttttagtagaagaaggtttgctctcacccgatcgttttgccccgatgtttggcatttatggtatggctgaagcagtttctctattacttgaaaaagaaggtcatacagcaaactatggtcatagcgaagcggccaataaacttagctatattattagtgaaaaactggcccaatttgttgcacagacccctgtaaaatatggttggaaacagcgtgccatgttacatgctcaatcaggcataagttctgatattggtactacaccggcgacccgaattccttatggaacagagcctgatcctgttactcatttaatgaccgttgccccccaccatcaattttatacttcaggtattagtgatattttaaccgtggatgaaactatcaaacaaaatcctgatgccttaatgcaactgtgcttaggggcgttttcttgcggattacgtgaatttaccgctaatgtgggtggcaatgatttagtccgtgtcactggctatatggtgcggttatcggatttaaaaaaatataaagaagaaggctctcgcctaaatacaacttggttaggagatgaagcaacaaccaattgccatattgctgaacgaaaaccacgagtgattagccatgaacagcagatgcgcttcgataaataaaatactgcctttttcttgtgttgatggcccaggcaatcgcctcgccatcttcctacaaggatgtaatttacgctgtaagaactgtcacaatccctacactatggggatttgtgataactgcggggattgcattgccacttgccctcagcaagctctctcgttgcaaaacggagtagtaaattggaactctcaccgttgtgagcaatgtgatacttgtattcagcaatgtcctcgccaatcaagccctatgacattgacctatacagttgatgaactaattgcaattacgcgtaaatatgccgcttttatcaatggggtaaccgtaagtggcggggaatctacgttacaacttccatttttaattgattattttaaagcaatcaaagcagcccctgatcttcgacatcttacctgtttaattgacagtaatggcactctttcacttaatggttggcaaaaaatcgccccctttatggatggtgcgatgattgatttaaaaagttggagtgaagaaacacatatttatttaaccggacgtagtaatcaacgtattaaaaaatcaatcaaatggttaagtgagcataatttacttgcagaattacgccttttatatattccagaaaaaaccgattatttagagaatatagaaccgctttcccagtttattaattcacttgatgaatccattccaattcgtattaatgcgtttcatcagcatggcgtatatggtgaagcgaagaattggcgatccgcaaataaagaacaaatcataaatctacaaaatgaattaatacttagaaaagtaaatttaattaaaataccaaatatatatacataataataatttcttactcattattatatattaaattcatttcattttattcaattgactttaattaatacagaggttaacctccagttaaaatcttatttttggtatataaaatgaaaatgaaaaataaatcaatattatatatattgtgtcctctctatatatggcctattaattgctacagcaattataatataaatgatatgggagactcaatttataacccttttagtattgcaaataatgcaagtcaatattatgaattcaatcataatagatatgaatacattaaacatctccacggccgtgtcttagataagcatagttacaaccaacagttaatgacgccgtttggaagcacttacatatatgcaacaataagtgatgatacactttcattatataatcgtatagctgatgaaggtgaacgtaatattcaaaaaaagatacctaattataatgttagagaaaccgtttatttctcagaagaactcttaccaaatgaattatttattagtatagatggcggaaagaccataaaaaaaataaataaagaaaataatccgcaattagatcttctttacctttcccatatttcaaaaaatagtaaaactgttgttgggtatgcctttgcaggtgctagagccagattagagcagatggttaaaaataatagtatttttgaagatactatcggttgtggtacatacaatggatgttatgtatttgcctataacgtatataacaatacattttctattttagatagaaatatggagattagatatttaacgaaagatggtaattttattttatatgaatacaaaggtgatgagagaaagaagctatatatttatgatatctataaaaaagaaaacttcgaattaacattcgataacgttaataagtatttagctaatcatctagaaaaagcaattttactttcaccaattactgaatatcctttcttaaagggaataaaaagaagaggtgttgatattcaaaaaatcagtgataatggtcaagtctttattggccagctaaaccgagatttgcctaaaaagaaattactggatagagaatatcctaaagttgcctttatcacaacagcatcaggccctatacgagaacttagtctctctgaatttggatcgacaaaacttgcagatacctcagcagatgggaactatagtgttggctggggagatgtttggcataataattatgcaattaggttacctactagaacaaaaacttcttcagcaatttttagtcaagcattactctatgacttctctaatgataaactcatcaatattggtaacctttctacaaaaaaagaagaatcggaatttagaaatgctagagcacttgatattactgctgatggtaaatatgttgtagggtggtctgaaactgatgagtataacttaaaaaccattccaaaagatctaacaggcactggtcctcatgcctttatcatgtttcatcgtcatggttttatttatttcaataatcatatgtatgacttaggaacacttgacgggggaaaagattcagaagcacatgccatctcagatgatggaagaatcatttatggtgtagccactaatgaacgtaataactggcgtcaagttatttggagaaatgatgaaatcgatgataaatatttcaatactgaacaacaagaaattgcagatgaaaaagataagcaagctgagcaagaaaaggctgagcaagaaaaagcggagcaagagcgcctagccagactgcaagctgagcaggaaaaaacggagcaagagcgcctagccagactgcaagctgagcaggaaaaagcgaagcaagaaaaagcggagcaagagcgcctagccagactgcaagctgagcaagaaaaagcagagcaagagcgcctagccagactgcaagctgagcaggaaaaggcggagcaagagcacctagccagactgcaagctgagcaagaaaaggcggagcaagagcgcctagccagactacaagctgataaagaacttccccctgtagaagatgaacaagtacaacaggctaaagcaaaggtaaaagagaaagaaacagcaaaatcatcgacagctatcagtaaaccaatcgatgtagaaaacagctataaatccatgcaattaatggctgaaaatagctataaacttatcgatatgcaacagggtcaattgcgttatttagcttccgccacctgttctgtcggtactgaaaaagcatgtcttagtggcttcacacactatcaaaatattgataaagccaacgctatacaaacgggcattagtggagcttatcgttttgatatcaatcaaacaccattagtggttggtcttgctattgatagcgatagctactcttctttacccacaggctatgaatatcaaggataccctttaccgttaattggttttagcgttgatttaatcccgtcactaaacccaacctcgaatggcaatgcattacatctttcattaaaaggggcatatgtaaaccgcaaagtcacgattaaaagaccaatattagataataccgaagcgggtaaaggccacgcaaagatctccggttattatattgattttcaaggatattatccttacacactcaataaccttatcactgtaacgccttttgcaggacttacttttaatcaaacatcacgctctgcttatagcgaaacacaagggactaaacttgcagtccattatcaagaacttaatgcacattcattgcttgcaaaaataggattaggaatagagtatacagtcaatgccaaactcaaactggacagcaaagcgggtttattatggcatttatcacatcaccaaggtgacttccaaagtcatattgattatctaggtcagcaaaaaattaactataacgacaacaaaaaacagttagcacagcgtccatttgctagtgtagggctaacttaccaactagataaacagtcatctgttaatacgacaacaaattggcaaatgaccccttatcgtaatcaagatattcatatgggtattggttatacatatcgtttttaattccttattattattataattagtagtaatagtttgcttcctatatttcaaaatacaggaagcttttttttattaaaatcgctctagtatcctttttactatcaacatattttttccttatctacccaccatattctggtagatactttttctagtaaggctttattgtgactaaagataattaaacttaaaggacgtttttgactttcatcgattaatacttgccaaattttggcttggatctgtgcatctaattgtgcagtcacttcatctgcaattaataattgtgttcgaggatcaagtgctcgtagtaatgcaatacgtgccaattctcctcctgataactcattaggcctacgggttaaccactctggctctatcatcaatttttcaagccacaggctatcaggcacccatgcatcacgtacactctctccggttgttctaaatggattaaaacatttatcaggatgttgcggaaccaattgaatgggacaataacctttcttaggcagaggttgctgattaaaaagaatttgcccactagtcggcatttgccattgtgctaatacacgacctaacgttgtttttcctctaccacttggcgcagaaatgcctaagcgctctcccgcctctaatgaaaaagagagatcatgccataacatcttaccggcttgttgcacagagagttgttgtagcgctaaaagtggcataaaaataacctcaaaaatagggttctctaagagaaaaaggtatataaagaagataatctatcactgctcaatatgggtatgggttgcaagccccctcttgtagatctaaaaactgctgttcaggcagtgcattccacaatgtttttagccattcactcccaccatgatgataaagcgctttagcagcgactatctcatttagctccccttgcctcaacacagcaatggtatcggcataacgagcagccaaagctaaatcatgggtgacccataggactgatttaccttgatgacataactcttttaaatgctctagcaataaacaagcgtgttcatcatcaagccatgatgttatctcatcagccagtatatattgtgcattagataatgttgcattgcaggcgagtactcgtttagccattccccccgataattttgcggggtaagttttcactaacgagctagagaggtgatataaaccaaattggtgtttaatatcttcataggtgatatcagcaccacttaaccgcgctgaacggcccagttgttcaccaatgctaattaacggattaagcgctgttacaccttgaggaatatagcaaaaagtattaccacgataagcaataagctctcgctcggttaacggatgcccattaagtttaattgtgcctcgggttcgcatattagcaggtagtagtcccaatgcactttgcaggagtaaacttttaccttcaccgctgccccccactaaagccagcattttgccaggtttaatatcaagagaaatagattttaataaaggctgccaagtgcgctttcctaaccaacgaaactgcgcaatatcaatggaaagctgttcaaaacttaacatcctgcccctcttaaccatagttgttgcatggctttagcaaattgatcaaatatcaataccaagcacattaaaattaatccgggaaaaaacaccatccaccaagcaccggtacttaaataacgtaaggcatccgctaatagcaatccaagagaaggctcatgcgctgcttgcccaaaacctaaaaagctcaacgcagcactatgcaataccgcatgtggaaacataagcaacgttcctacaatccattgcggtaataacattgggatatagtgttttttcacacactcaaaaggtgtattgccaatacggcgagatagcatcacataatctgcttcacgaatacgttgaatttcaccacgtaaaattagggctaatttgggccaatgggttaatgcaacagcccagataacaccttgctgtcccccacctaaagtaaaacagatcaagatcaacaacagtaaatgaggtaatgctaacaaggcatcaaccacccctctgaccaataaatcacaatggcgattaatggaggagatcccagcaaatatcaaagcaatagcaccactgacaacggcactagtgacaccgatatttaagctacttaacataccttgaaaacagcgtaaccacagtgaacggcctaaattatccgtgccaaaccagtactgagttgatggcgcttggtttctagctaaaaaatccatcacaatatcagtatgagaaacagataagccataaataaccagccccactaatacgattgagacaaatagcagtctaaataaaggcttattgggatcgtaaatcataagtcgcgcaaaattcctttattaattcgtcgtaacaagtagttagagatactgtttccaaagaaaatgagaattgtgctaaatacaacaatccccattaatagggggatatccccacgcaatccggcatctactgtcgcttgccctaatcccggataagcaaaaaccttctccgccaataatgaaccacctaacaattcaccaattgatgcaaactgtaagcaaagtgcgggagtaatggcatgacgtagaacatgaaaaagcatcatagcccaacctttatcaccttgggctttagcaaaatgaataaattcactgcccatcacttcagcaacttttgcgcgagtatgcagtgcgatattacctgtacctaataatcctaacgctatcataggtaaaataagatgcgaaaaacgttggcccaatgtggctgcttcagcactactgcccatcggccatgcacagcaaataggtgcccagtgtaacgttaccgaaaacagcgataacaacagcaatccaacccaaaaagtcggtaatgaggccagcaaataagagagggttgagatgatcctatcaggccaacgattaagatatcgtcctgccactaaccccattaacacccctattacacctgaaaatagccacgcagaaaaaagcaggataaacgaaggccctgcccgttggcgaataacatcaataaccggcatgttatagagtatggaataaccaaaatcaccttggattatctggctaaaccagagccaaaaacgcatccatagtggctgatccatcccccagcgagccgctatcagcggatactgctcaggcggaacgtttagcaaatcactaccgatataggccttgatcggatcaatcggcgaaaaacttaataaaataaaaacacctgctgttgttaccagcagcaggcataataatcgcaggaaaaatcctactgtttgacgtattactgacaagtccacttccaagtatctacgctatttaataatgaccatgaaccgtgaatttccggagcgccagtgcctaaatcaacacaaggatcggttaagtaagtatgctgaatattcattaaccaagcccaagcagcatcacctttgataccgacgccatttttaccatcccactctaccgcttgccaatgtggtaccgcttgttgccatgtcggtgcatctaatgctgcttgtaaatgtttttcaacggcaggatttttataatacccaggattatagtaacccacacctgcggcattcatactatagtgatgatagagctccatcggatcaagacttccccaaccaaacaaagtcgggtttgagtgcatataacgctctacggtatcccagcttcctgacttaagatccatttgaatgccaagaggttgcactaacgcacgaattgattcagctaaatcgcgacgagttgcatcaccactggtgtaccagagtgttaatttcgcttctagaccgtctttttctcgaatgccatttttattgagtttccaacccgcatcatcaagaatttgtttggctttttcaatatcaccatctttaaatgcagcctcggtttgatcccaaggtaatccttttacgccggtataagcaggaactgcatatccatctaatacttgctctgccagtaattggcggttaagggcatagttaatcgctttacggatggcgatatctgcagtgatatcattaccgatatcatacccttgtgcatttttctcacctgatttcaccataggaaagacgataccacgattttcaacactggctctttcccacaattttacattaggcaaatttttagcaatggctgcggtggcaggaggaatacgaacaacccctagttgtccactttgagcggcagcaaaagcggcatcttcatcaagaaaaacaaagataagcttttcgaaatcatttttcttacccgcataataagggtttgcctcaacgatgagttgctgacccggttgaaaactgaccatacgataaggaccggcaccaatcggcttttgtgcataggttttttcatcatatttatcagctgaaacaatgcctagcgagcctaatacattaacaaaagtactttgaggcgcttttaaagcaatagtgacatgtaaatcatcatctgccgttgcagaaagaaagtttcccatatccactttaccgccacttgccgcagcattgttataggtaaaggcaacatcttttgcggttaaaggggaaccatcagaaaatttcaaatctggttttaacgtcagcttccatgttgtgccctctgcactaggctgataatcactgagcatattgctataccaactcagatccgcattttgctttaataatgggctgtgtagcagtaagtagctaccatggctccaccctaacatgggatcaaaaccttctgtcggctcttcaccaatggctagttttaaggtttgtgctgaagtagtaacaggaacgctaagtgcggctaagcaggataaagcaataaacgattttcgccaactaaaccgaatagacataaatattctccgattttttagatacgacttatcatcagtctcaatctgtttgaaagagacagaaaagaaataagttaactgttgttattatgatgttctgcacattgatgcagacaaaaggattaattgcttggcatcataaaagcttttcttgaattactcgaataatatccaacattttattgattttacataaactttcatcaagcaatagcgttcaatatgacaaaattttaaatagagcacagtttttttctaataaatcagttatataggttatgctcattcttaatcatgagcatataacaaaataaattgctatttttacgaaataacctaattttacgataagtatattaatgaaaaaataaagggtgcaaattattacacccctttatatttattctgctaatatttttttcagtcgaaaataacgccgacctaaacgccattttaatctaaaatctttcgcatttttccaaattaatgcccaaattccccgctcaaaaaataccttaactatctgttttttggtttctggtgaactaatcgcatcaatagaatgaataatacctaaaccttctttggctatttgccaataacaagcattgatcgtttttgctatctcagcatggcgttgattaatagcatccagcatctcaagtattttcatataattataaattgttcttacatgaatacgatcatcgggtgtcgtatgcgacacggagccagaatgaataaaatagtcgtaataacgctcatcgatatattttacccgtttcgccgttaataacacttctgtcgtccaaggaatatcttggtgatgcaaacccggctcaaagtaataaccatgctccaataaaaactgacgtcgataaatatttagccatgtaacatgtaagaactttttcgattcaagagcacgttcaagccattgaggcccggttaatacctctgtggttgttaaacgcgttgaaggaaagatagggcgtgttggtcggtttttatcatcataaacataattcccattacaggttgccacatccaaattatcggcttgggcaatttcaagtaatcggggatacatgcgtttatctatcacatcatcaatatcaggaaaagcaacgtattccccctttgcaacagcaaatcctgtattacgcgcaacggaaacaccttggttttcttgtgttaaaatagtgacattgggaaagtgtttttcccatttatctaagatctgacgagagttatcagtagagccatcatcaactaaaataagttcccagttttccagttgttgtgcatgtaaacaattaaaaaactgtggtaaaaatttttcaccattaaaaaccgccaccacaatacttaattggggaaaagaagaggacataccgaaccttttatttttttaataagacagaaatattttgtcgtgaacatttttgcttaagggcattaagggtagcaaagatagttagcttaatatgaagctaatcttgctatgttacacttaacattaatcaaaaagtgcgctttttgagccaattaggcctctaaaattcactagttaggctaagtataagtaattttgtcttgatactgatgaagaaagggttaaggatgtgcgttttttaaaaaagataggctcaagatgactgtttatccatgagtgatataagttacaaaactgtctttttttggcggttgtgacacttatatcactcattaatataaaacatccgcagaacggatgttttttacttatggatacttatttatactttatgttttttatactttaatttttctattcttcgatatcgtcttcatcacagacttcaagctcaggaaagtaatcaactcgccaagacttaatgccttgataaactttatcaacagcgtttcttaccgcttcggtcattgggtaatagaatcccaccagatcgggctggatccccaagaaagtaatatcggggatatcgtcctttaattgatctatcagaaaatttaacggcatgttatgggtgctcataataaacatttctgcaatataatcaggatctattacccttatttcaccaggttttaaaccaatatcagccgcatcaacaatgacaacacattgcggttgtaatgctcttatttgataagaaacattctctggcgcacttcccccattgataaccatccaaccatcaatcgggtttgcttccattaagtccgctaatagaggaccggctccatcatcccccatcatgctatttcctaccgttaatacgaccttaggtgctgtcattgtttcactcatggttttctctttactatcaaataaatcgctggctctataacaatttcacctaataaattaatcagcgtttggctccactcactaaaaagtggatcatcacttttggcaataggatcgaaagctaaagctaacatgtgagtatgttcagaattgatattgatctcaccgaaagttagcaatccttgcatttttcgttttgcttccccctcaggtaataaatcaatccatgcttgatatttttctaaaggacaaaccaactctgtttttaagcagtcaatcatgccgacgtgatgaccaatcgccaacgagtagtacatcacttgttgcgcctgctcaggtatatcatcatcgctatcaacaaacttttgtcttaatgaccaaaagtaaactttagcgtcatcagacatgaacgcctccttggtttaatgaatgcaccagtcgttttacaatttccgctaaacgaggatcattcgcttggcgtaaccattcatcaacacgcccactgacttcttgtactgtggcaccatcaagtaaagtgaggaaatgatcactaatttgtcgcccttgataataaccagcaagacgacgagcttcacgctctatcattacgcgtgtatcaagagggatcgacggcagtaacagtgacgcttgctcattatccacttcagtgtgattttgaccttttagtttttgatctaataagcctaatgccacagcaaaaccataaatagttgctgcaggtgtcggaggacaaccagggatccacacatcaataggaacgatggtttcactcccaccccatacacaatagagatcgtggaatatcccaccaccacaaccacaagccccataagagatacaaattttgggatctggtgctgattcataagcacgtaatgccggtacacgcatttggcgtgttacggcaccagtaaataacaaaatatcagcatggcgaggtgaagcaaccaccttgataccaaatcgctcggcatcaaaaacaggtgtaattgcagagaaaatttcaatctcacaaccattacaaccaccacagtcaacacgataaacatacgcggaacgttgaatatctttcaataacgtttttttcagctttttcacctgatcacttaatgtgataggttggctgacatgatgattgatgggaatttctggtagactcattttttcacactcccgacattgcccatactaatattttcttgaccatcagagagtaggttatgtttacgtttacactcagggcaagtttcaaattgtggacgcattgcctcaacagtttgtgcatcccaacccgattgcaccagcagtgccatagcgtaatcaacagattttctaggtgtaaagggttgatgacactcacggcagcttaataatttaaatgtacctttaatataaagatctgatttttgtgtgactgccgtttcaaacatatctgataatacaattgcccgagttgggcagacttcttcacaacggccgcaataaatacaacgaccaataaataactgccagtgacgttcacccgtttcgaggttggtttccatggtcagtgcattcgcaggacatgcagaagtacaagccccacaaacaatacattgctcaggtgagtactcaggttttcctctaaaaccatcagggagttctaatggtttaaaaggatattttgttgttgcatcgcctgttttgataatggttttaaacaattttaacatcgttcagtccctcacttgagcggcgaatttttacgttcgatgctataacgttcaatttctttataagaaactgttttcgatttacgttttttcacatcgacaagcgttaccctgtcagtacaggagtaacaaggatcgaggctaccgataattaatggtgcatcagaaaccgtatttccttgtaacatataacgtagtactggccagttagcgtaagtggccgcacgacaacgccaacggaataatttttgattatcacccaacatactccagtgaatatcttcacctcgtggagcttcggtaaaaccaagtgcaaatttataaggttggtaggtaaagccttctgttaataacggtccttccggcagattatctaaggcatattcaatcattgccatagaatcaagcacttccttaatacgcaccatcacacgtgagaaaacatccccaccttcataactaaatagggttaatggtaagttgccataatctgcaaatgggtgatcaaagcgtacatcacgtttaaaaccactggctctgatcatggggcctaccggactgaaatcacgcgcgactttcttatctaaaatcccgaccccaacggtacgctgttccatatttggcgcagaaagtaagatgtcgactaattcagtgacttctttgcgcatttctctgactaattggatagttttaatacgttgatcttttaaaatatcgcgacgaataccaccaattaagtttaagccgtaggtcttacgtgctcccgtcagcatttcagcaatctgcatggatttttcacgaatacggaagaattgcatgaaaccggtatcaaatccggtaaagtgacttgctaaaccgatatttaataaatgactatgtagacgttcaacttctaataaaatagaacggatagtatgagcgcgacgaggcacttcaatacctaacgcattttcaacagaagtggtatatgccacgctatgtgtaaagccacaaatcccacagacacggtctgataggaaagtcacttcattatagcccatacgggtttctgccaatttttccataccacggtgtacatagaacatgcgatagtcagcatcaacaatattttcaccgtcaacaaataaacggaaatgtcccggttcatcagacgtaatatgcatagggccgataggaacgacacgcgcatcttgtttgccttcgttcacaaacggataggtttctgtttctgtggttggcgttggacgttggcgataatccatggcatctttacgtaacggatacatatcttcaggccaatcatctggaagcactaaacgacgctcatccggtaagcccacaggaataagaccatacatatcacgaatttcacgctctccccatactgctgcaggaactcgcggggtaacagaaggaaattcaagtgtaataggactaacgtgtgctttaacgactatccagcacttttcaccctcttccatcgataaggcgtaatagacggcataatcaccatttaaactacgttcatcgttaccaaataaaacaggtaaccagcctcctaaaccgtaatatagatactccaccacttcaggcagtgatcccgttttaactgttatcgtcaattgatcagcggtttgtcgctcttcatcaagaatagctgatgggaatttttctcgaactttagcaatataacccgcaccgagttcgtttccctcttttctactgacataattttgatagctcacgttacttctcctgaaccgatattgatggattgctgattaacgttgttggccatgtataatttggtgatccactctcatcgatattcatcacgatattggctgcgttctccaataactcactgactggcttaggaatatgtgttcccattaacaacataagcgcaatcaaaatgatcatcggtagtgtggttaacagacctaattcacctttggcaaccacatccggttttggaccaaataccgttttagctaccatacgaactaatccacctaatactacggttaataacaataataatagaattgttaatcccatatgcttagctgctaagcctgcaacaacaatcataaattcactgataaagacattaaatggtggcatgccccctaatgccaaagcaccgccagcaaataatgcagcacttaatggcattactttaaacatacctttcacgacatttagatcccgtgtaccgtatttcagtaacacgttaccagagccgcagaacagcaatgcttttgctaagctgtggtttaacgtgtggaataaagccgccaaaatcccaatcgggccaccaatacccagagccactgcaattaaccccatgttttccacactggagtacgctaataagcgtttcatatcgcgctggatcagaataaagaacgcggcgatagcaacagagaggaagccaaagattaacaataggttacgagtgaattcagtgcctattgctgcatcaataataatgtagtaacgaataatgattaacagcgcacagtttaataacaccgcagataacagcgcactaacagggcttggcgcttcactgtgagcatctggtaaccatgcatgcattgggaataacccggttttggtaccgaaaccgatcaaaataaatacaaaagctaaatgcatcagtgttggatctaactgatgtgtatatttcaacacttctgtccagaagatggcctgatcaggatcaggcataaagcttgctgcattggcataaactaaaattgtgccaaaaagaccaaatgcgacaccgacactacagataataatgtacttccatgcagcttctaatgaagagcgttgaccataaatccctactaaaaaagcagagcttaatgttgtggcttcaatcgcggcccacatcaagatcaagttattactggtgatcgctaataacatggtgaaaaggaagaggtggaagaaaccatagtagttacataaagtacgaacagaaatttcgccctcatccacttcatgattcatataaccaatagaatacaggccggttaaaaaaccaatgatgcctaaaatggctagaaatagtgcccctaaactatcaacatgaacccatttcgctgccgccagtatttcgccatgggacatcacatcagcaacagtgcctaacgcggcaatgactaagacaaaaatacctatagtatgaatgcctgtaacgataggacgtgccgctgctttcaataatgggcttaaaaatgccaatatcgaaaataccagcggtgcaaacattaagattgttaacatggttgtttgattcatctcctcaccccttcagcgcggtcagttgatccacgttcagtgtgttgagcgtgcggtaaatcttacgcgccaatactgccatgacaatcacagcaaaaatggcatccgttgctataccaatttctaccaactctggtgccctccacgctaataaagcgagtgttaagtgagagccgttttccattaagcagtaaccaaatgcttgttttagaatatttcgttgagtcacaatacacagtagacctagcataaaatggcctaaagagaccgctaatgcaggtttcaattccgccaccataggtatttgaattggctcaaccacaaaccaacataaaatcacaatcacggcggctaataacatcaataatgctggtttaatgacactgatattggcgctcggatcggataatttgcggaaggcaaatcctaagataagtggaacgagtagaactttggtaaagaaggcggttatcgcccaaagtgtcagttgatgtgcatctagcgtatttgctaaagtgacaaaaatcatcaccaaaacaaaggattgcagagcataaaaccaacaggaagcaataggctttcttgcgcctatcaccagtagcgaggtgatcatcattaaccccgctaaattattaacaataagtgctccagtcatgatttatccccttatcctagccaagtcacagcaataacactggatgcgaaagacataataatcagtattccaatcacaatttgcattgccataggaaccggttgtccttgcgcaacttctttacttggttctcctggcaccacacggccaaaccagtagataaaccaagtgaaacttgcaacagattcaatcagtaccagaaccataataggtgtcattacccagaacacactcgataattcaaagcctgctgcaaagatagggaatttactaaagaaaccattgagtggtggtacacctgcaatcgctaacgcagcaacacaaaagcccacacccagcaatggatatttattaattaacccttttaagcgcggtaacatacgagtaccacagctataactcagagcacctgcgactaagaagaacaaacttttagcaaaagcgtggttaaagatataagccacaccaccattaaaggcttcacgaggtccaaagattgagatagataacgcgaggaagatataagaaagctgtgtaatggttgaccatgctaacagacgtttcatatctttttgtggcagatacatcataaagccataaatcagagtgataaccgccatggcgatccccacccaaccaatgatatgagggacatcaccggctgaaataatggcacgagcaaagatatacacacccactttaaccattgacgcagcgtgtaagtaagcacttacaggtgttggtgcttccattgcatcaggtaaccaagcttgtaaaggaagctgtgctgatttaccccaagcagcaaacagaataccgccaaagacaatcagttttgttggctcatctaatgttgctatcgcagttagttcaaacgaacccgtacttacaaacaaggttgcagctgcaagatacagaccgattgacgcaacatgagtaattaacaatgccttcattgccgaacgcaatgacttctctgattggtaataaccaattaatgcccaagaacaaccaccggtaatttcaaaaaacagcagttgccctaaaatggtagatgacagtactaaacctgccatagcaccaataaagatcaacaggaaagcataataacgacgagtcccatcatgaggatgctcacggttaccgttagtgagataacccgttgaataaaaactgacgagtaatcctaagaacacaacggcaaaagcaattaaggtactgacgcgatcaatggtaaaaccaaatagcgcaacatcaccatattgtactagcgtaattgtggtatcgactttaccttcagcgaggaactgccaacctaaaacaacagtacctaatgtggctaataaagcgaacagtgtacataaccacttcgccatccgatttggcagtatggacgtaattaacgcccctgcaaatgggatgagtaaggtcgcaagagctatattttccattgcaatcatcgctccttatagaccagttaaatagaaaacaaaagccagtgccgcaacaccgaaccctaaccatgtcacatgctgagtcagtaagaagcgaccacgcgctaaactgttttcaactaatgacgctaatacaaacacgaccagcaatttcacggccattaacactaaggcgacaagaagcgcgacaaaagtaaattcagtcgctttgccaaaaggaataaatacggcaaggaacagctcagcaatcaccacttgttttaaaccaatacccagtttaaccatggcaaaaccagagccggagtactcggttagtggtccttcttgtaattcttgctctgcttccgcgacgtcaaaaggcattttgcccatttcaataaatgccgcaaaagcacaagccaataaggctaaaagtgtagctgtgggtgatacccaaccttgggcgagtgtcgcactgatagtgccgacattggttgaacccacaatcaatgccaccacaatcaacgaaagcactaaaataggctcaactaatacacccaatgtcagttcacggctggccccaatacccgcaaatggactacctgaatccaaacccgataaagagaaaaagaaacgaaatagcgcaaacagataaattaatgcaattaagtcagctgcaccgccaaacaaagaggttgccgtaaagacaggcaatgccattgccactaataacatactgcctaataacacataaggcatcacttggaagatcacgccggattgctcaggggctacggattgacgtttaagtaatttaaaaatatctcggtaatcctgccaaataccaggaccttgacgcgaatgcatcttggcacgaatttggcgagaaatacctgtacataatggggttatcgccagcagaaagagtgcttgaataaccgcgaatattcccatcataaacgaaggtgtttcttggaaagtcatcattccctctccttacgctgcgataactaaaagcaagatgaccagcgctgccaccacgtacagacaatagagtctgaaatcgccgccttgtaggcattggatacgtttagcaaaacgttggataccacgaaccaatggataaataatgctttcatcccagaatggttcgaccttttcagcaccgcgctgtgttttattaaagccacgtgaaagccaaggtgatggatcaagctgtttacgcatacgataaagtggtgcaaacatactacgtagtgcttgagtaaagcccccagcggacaccgccatgtctttttcccagacataaccacaagcccatggattacctttacggcgaaatgcaggttgaccaccttttaagccgagataaattaagaatggaattagtggtaaggcgattaataaaataaatgttaaggcaggagagaacatcgcttgtgatgcactatcagggactaatatcgcaccttgagtcactgttaatgcactggtttcgctaagtgacattgcaatattggcaataattggcgcaacaaaagccgcacccacacctaatacaacacagaaaagtgctaataaccccatagcaatggtcattggcaacggtacttctttagctttagtcgcttgctcactacgtgggccaccgcaaaaactgacgccataaactttgacgaaacacatggccgctaatgccccggtaattgccaacataataatggcaataggaccacttaagcgcatgacaaagttaccatcgtaactcatcgtaaatagtgattgataagtataccactcactcacaaaaccatttaatggcggtaatgctgaaattgccatacaaccaattaagaatgccgttgcagtgtaaggcattagtttggctaatccacccatcttatccatatcacgagtgtgaatttgattaataatggctccggcacctaagaacaataatcctttaaataccgcgtgatttaataagtggtataacgcaccaagcagaccgagagcggcaatcactggatgatcggttgccatacctaccatgccaactcccacgcccatcaagatgatgccgatattttcaacggtgtgccatgcaaggagacgttttaaatcgtgctctgctaatgcgtacataacccctaatacagaagagacagcaccgaatgcgagaacgacaattccccaccacatttgtgaagcacctaataaatcaatgcctactttgatgatgccaaaaataccaattttcaccatcaccccagacattaatgctgaagcgtgagagggtgctgcggggtgcgcttttggcaaccaactgtgtaatggcaacataccggctttggcaccaaatccgaagaagcccagtaagaacaccacagaagccattgcaggggaaagagaaagttgacggaatgaatcaaaatcaaggctaccgctttcacgccacattaagaagaaggctatcatgattagcacagagcctgcgtgagcgataaagaagtagagtaaaccggcgtggatagattcgtcatcttggtcagcgatgactaagaaccaagatgctaacgacatcatttcaaataggataataaagtaaaacgcattatccataacaatcagtcctaccatggaagcaataaagagattcataaaaaatcccatactccatgcgccgcgacctttgtattcttgaacataagagagtgaatacaacgcacaaacagtgacgagtaaagaaatgacaaacaccataaaggcgccaagcatatccatacgcaccacaaaagcggcgaaatcaaatggcccagccatagcaaaactgattgtttcaccatttaaaataactggtaatgcgcttaaaacacctaatacaccaccgatgattgcgctgatccccgatattaggattgccaatccttcctgtttctttaaaaacagtgcaataacgccaccaacaacatacaggatgattgaccacatcagtaactgaagaggttccatattacttgcgctcctgtgtcaacgtagatagatcatcaagacttgtcataggttccatcacagagtctaaacgacgcgctttcatctgctcttcaaggctatcttcttcaactagatgtaaggcatctgtcggacagacttttacgcaagcaggcccctcatctgagaaagcacacaagtcacatttcactgctattgcgcgaatacccgcattccatgcaaggaatggattggtagtaggaagacttgcgggcacatctgccagcatctcttcaggcacaaaatggtcaaacacagccggtaagttaacgggtttactgcctgatggtgtaatcgcaccaaaaggacataccaaaccgcataacttacagccaatacacaagctctcattaagaaagatcatattatcttcatgagtaatggcattgactgggcacacactagcacaaggagcatcctcacaatgccgacaaagcatcggggcggtctgatcctccacttttaccactgtaagacgcggatgcgcctgtaatcccacagcttggtgtacttccgaacaagctgccatacaggtattacaccctatgcatcgttgtggctctgcaataacaaagcgattcattcgccacatcctccgagaaaaacgtttaacagctcacggctgtcgttaatttttctctagatgaagcatatttcatgccaagagcagtaatattttatttttgttaaaaatcaatgcattataaataaaaattaatttacttgatgacgtgtcgacaattatgacgttgacacttaagtggtgggaaagagtgatatgattgaaaaagcctgcaaaagcaggcttacaaaaaagggattagtcagtataaatgcgcttttcaacttctttcatggtctgtaagccacattgtaaatcatctggggtcgcttcagaaaacccttgtgtaaaggttgcagataaataagcatctaccatcatattggctttaaagggagtaatcagtaaaccccccatggctagcatattgcaattattaatcactttacaaaaacgcgcagtggtaacactctcacaaaccccgcaataaacatttttatgtttattagcactaatacttactcccatccctgtgccacaaaaaacaaaaccaatatattcaggatgttctgaaataatagcgccaactttatcaccaacatcacaataaccaataggtcctgattcggtaatatcttttattgtgtaattttttgcttgtagatgagatttgacggcatttttaagttcataacctgaaggatctgcccccataacaattattttctgttccatatcgcctcctaaataaattgagagtcatggtcaaagaaaagatatctgattgataaccattaaaaccaaataaaaacatctcactcaatgagttgttacttattaaagtatagacgataaatattttatttatattcaaaaattttaaatttctctgtaatcaatttagagaactttaaataaccatcataatcataaggttttatttttgatgaaaatcaaaaaaaaattaatgacaataaaattgtgtttataggataggaaaaaattttttttaaaataacatactaatctgattatgaatttacacttaagagaatttacgtatagaaaaaggaccaaaaagcatcaatctagtataaaaagtgctaattatcagataaataagaacgaaacgtaagaaaagaaaaaataaaagagatattttagatatagtattatattggaaatagtttccctagtacaaaaaataaaaataaaaataaatatcaataatattacaggattacagtttttatctatattcttcaatatctctaaaaggaaaggtcaaaataaattaaataaatattgctgtggattatctttaccaaaataatcaacaactacattgtaaaaaaatggctattttttaccaattccaatctggcattgctcatgctgttttggcataaataaagaatgaaataatatattgattttatattatatcacttatctatataacgattttataaaacaccgtattaaagtaaattaatcaatttttttaaagataatttgttatatttatcaaattttttgcgtataaaataaaaataccacaatcaagagagcatatgtggtattttatattggtataaacgttcgggaaaataatcgcgatgattattttacgcgtgatacatattcaccagaacgcgtatccactttaatcacttcaccgatttgtacgaacagaggtactttaaccacagcgccagtgcttaatgttgctggtttaccgcctgtacccgcagtatcccctttcagacctggatcggtatcaacgatttctaactcaacaaagtttggtggaacaacagcaataggacgattatcccacagtgtaacgatacactctgcttggtcaatcaaccatttagcattttcgccaaccgctttttcgtctgcagctaattgttcaaaggtttcgttgttcatgaaatgccagaactcaccatcgttgtacaggtaagttaagttgatatccatgacatctgcaccctcagcagaatcagtagatttgaaggttttttccagtaatttgttagaaatcagtttacgcagacgcacacgagcaaatgcctgacctttacctggtttcacaaattcacattcagtaatgacggctggctcgccatctaacatgattttaagacctgaacgaaaatcgttggtattataagaagccatgaatatcctctaacttttttaatttaaaatggcatagccaaaaatggcacacattgtaactcataatcacaccaccagagaagtctggttaacacaactcgcgcaggcaatcagtgatcctgttgaattactccaacttttagcgctggaacatcacgctgaactacaacggggtgctcaggcgagacgactttttcctttacgggttccccgtgaattcgttgcgcgcatgaaaaaaggcgatcctaacgatccattacttttacaagtattaactgcacatgctgaatttaccctaacgccgggattctctacggatccattagatgagcaacaaaatgcggtgccgggtttattacataaatatcagaatcgtgcattgcttttggtcaaaggtggttgcgctgtcaattgccgttactgtttccgacgccattttccttacgaagataacaagggaaacaaagctaactggcaaaaggcaatagagtatatcaaaaataacccaaaactcgatgaaatcatcttttcgggtggcgatccgctgatggccaaagatgacgagctagattggttaattactcagctagaagccatcccccacattaaacgtttacgtattcactctcgtttacctgtggtgatccctgcgcgtattactcataggttatgtcagcgcttacagcagtcacgtttacaaaatattatggtattgcatatcaatcatgcaaatgaaattgatgatgcgttaagagaagcttgcttaaaactaaaaaatgcccatgttacgctattaaaccaaggggtattactgcgaggggttaacgacaatgcccaaacccttgctgatttaagtcgtgcactatttgacgcaggcatcatgccttattaccttcatgtgctagataaagtacagggagcggctcattttatggtaccagacagtgaagcgcgcgaaataatgaaatcattaatgagtcttgtctctggctatatggttcctaaactcacgcgtgaaattggaggagagccaagcaaaaccttgcttgatttaggcttacgacaagtatagtggataggaacttataaaataacattgaataccgttatttggcctagacaataggcctatccggtaaaaatagtagtacctcataaaaagcaaataagaatgatcgcgttcttatttgcccaatattacgttaatgcatattactcgactaaaatcgctacatcgacactgcccgagtatctatctgcgggaatattactatttgcacaaagattaaaatataacgtttgattaaaaactttgggcatagcattaactaatttattactaccgacataacttaacgcatcactggaattaggttcacaaatagtattttgttgttggctagttagcgaagtcaccacataaccgctttcctgcgctttagtgccggttaattccattcccgtattactgcctttgactaaggtattaaacggtcttaatgtgatatgtacattcccagcatagggacaatcaacatttatactggcaatattctcatcgagtttagtcggtgtagcaaaattttgtgctatttgactacggtaattaatcgatgttgctgtttgtggcgtcacatcgcaggcttttaatgtatggactgttatctttgtactagaatctgaaaaataaggcctagcatcaattgaaaatccagaactaatagctacattaaattgcaaagaatgatctctggctagactataatttcccggctctaacgcaccaatagcgtaaactgaatatccactgatagtgccaatagaaagtaacaatacatttttttatttgcgggaacgtcattactctttgcctttacataacagcattgctggttatcaccttgtttaacttaataattataaaaattattgacaattaacggtcaccattcttattgggttttgttgtgatacttcaatcttttcaagctctgaataactaaattgacatgaatgtttgcccgtattgttattccaagtcaccacgacattcccatcattgggtaacccactcatataaagagattgataggcatcaataataccggtatttacctgtttatctttttcatctgtcaaagaagccattgcaccaaaaggtatcgctatattttccgctgtttttatatcaaaaataacctgataacccactttagtttgaaattgtcttgctaaaatagccccttcggttggatagactttcattgacgtttcattaagtgtcacatcatcaggtaatgtgctgacatttacgctaatactgtttgtatcataaggacttaattgagggacaatggcattaccaaatgtatctattttcacatttccattgatttctgcgccctttgctttatctgcgctcactatggcaatactgtcacctaacatccttgataatgtcactccttttgagtgcagaacaacaccaccaataaggctaccattaaagctatttctatttttcccatagctataacccccagaaagcgttcctttacttcctgaataactcatattcatattgccactataactatctgccttgttatctgtattctggtagataccataagagagttgattatcaaatgcagagccatttaaaccggcttgttgcgaagttcttccatcattgctatgtgtcagaagatagcttgcattcatattttgcaagccacttgcatttgagaacacactcagtggcatattcatattaaaattaatttgtctattttctggccatgtattgtcatcactttttaggcgagaaatagaataatctatattaaatgcaatacctttcagaacagtgttatagcctaatgtgacactattattaacacggctattcccccaataacggctggtttcaccacgaagatacatggaaccgtattttcctaatgattgtgaaattgaagtttgaaaactagatttctgacgttggcttaaccaaggtgcaataccttctcgcaattcataacctgagttattgtaatcactaaagtcatagtaatctttagttgaataacgtaatgcggttaaatcaaacgaagtccctgtagataataaactcttagaataacgaacccgatatgattgaccgtgataagttttatccaaattagctctggcgagagtgacgtccgcagataaggcacctaataacccaagagaaacacccgaaccgataacaccagaggtataaccattggcaattaataaaccaccgtatgcagtgattgagttattgataccataactaaacgttcctaaagcaaatttactttttttggaatctgtcgtgataccaccatcatattgccccgcactaaactcatactcaaattgcccttcacgcaacatgataggcagcgatgaataggcttgtgtatatacacgtttagagccatcttcttcttcaatggttatttcaaggtccccaccaataccgccggcggaaatatcattaataataaaattcccaggagcaacaaaagatttatagataatttgaccattttgacgaatggtaacggttgcattgctgttggcaaaacctcttaccacaggagcatatccacgcatactacttggtaacatttgttggttagtggctaaagaaatcccctttatcggaatacttgaaaaaatattccctccagtggtaatttcaccaattttcagcattgattttaaataagcgatatttcgcattacataggtattactaaattcagaatcacttgaagaacgctgatctgaaccactcgaattattataagaataatttgttcttaaacgccaagggcctatatttacaccaccattaagattcaagaaaaagttgttattatggcttgaataatcacctgtcgttctatttttaataaagttagccatataattaaggataacagcactcacgccatcatctaataattctgcgggaatttcaccttgaaagctcttatccatattaacttggggaaaagatgcatttaatgttaatttattaatattaaaggttagccttgaattaggaatatacgcttctatattatcaatttctgtatcttcgggtagatcacttagcttacttatcgctgaaacattaaccccaaatagcttcaaatctttgattgtaacaactgggacaactttaccttctttgtttgctttaaataaaattgtcttttcacctaatggctcagtattaacaaaaacgcttaaactatagtctcctggtgcaatgtagtcttctttgctgaaattacttaaatcaatattgtcgttattatttagtaaaagattcggatcaaagtaattatcagacaatgcgattttcggcattgccacagataaaacacaaagattgatacaaagaattttatgcaacataggtttcataaaccaccccaaagaccacccataaataagaattattgttaagttaatattctttatcttttattataaagaaattttcatcattgaatctccaactcagctttccttgaacatttttaggtgcttcaactgatactgtagagaatggttttaccgttattgctctaccatcattttttatttcaacctcgcccacttttaaatattcaaaagtcatataaagtggtgatttattatttataactatgttctcatttaccttttcaacaataacatcatcaataacatctttattttccaatgccattattgactcaggtctataaattaatttgaagaagaaagtaggtgttatcgttagtgacacagatttcttttcctcaattttactatccttaagaggaactgctctaaatgcaatccaaaataagctttctctgtcttttggtaacgccatatcattagaaccttcactaatacgacgaatattccagctatattcactagagggttctaaacgatacaaaggtggtaaaatcataaaaggtgttctttcacgatctttattcactataggtacatttttatcatcatcattaaataaaatagagctattaattaaataagcactattgttattattttttaaagagatagagataccttttatatcactttccagatagatatatctttttactacaaaagaaaaaccatttttcccgaaatctgttagatccacagtatcgttttctattttttcaactgctttcgatgtgactgaataagatagaaaaaataggcagaatatgactatctggataatatttttttttctacctcttaaaaaagataacatttagtcactccacaattattttattttcaaatgtatttgataatccaccaaaatcatcaatatattgccaactaacctgtttaattgatttatctatagctaaattgagtgacgaaaatggcgcaaccataggtgcatttgctgattgataacttttgccatcgaattttaaatttgataccgtaaaataataaggtgttgggttattgacttgcacattattacctacttttttaaaggttatcttcttagcatgactatctagtgatgttatggctaattcatttggtcgataaaatccttttatgataatttttgttaccatattaatttttagtgataaatcaccactattattttgttgccctctttttgtttcaggtatcaaatatgcagtgaaaaaaaagagtgattcccgatcacttggcaatgtatctaaagagcgtggtaaaatttttatagaaaccgatgactgaggctctaatcgttttaacggtggcaatacaataaaatgttcatcttttttgccatctaaatcagccgttatcatattttgagataaataaagattatctgtatcattatttatttgtacactttgacttttatctccctcagaaaatataatgcgactttgtgacaaagatagccctgcataactatatgatgcagaaaaaataaaacagctaaaaagtaatgaaatcgtttttaatatattcatattttaatcaatcagaaaaaaagctaagcactactgttgccgtaaaagggccaacctctggagtacatccctctttttgacaacgcaactttgctgttaatgatttagtcgagctttctgaggttatattatcccacacaacagaatcatcagaaggtttaaaaacagagctattatttactttatatgttttactaccactgtcgtctgtaagttgaacaccaaatgacccagaaacattgttattaaaaaaatctcgagttccggttaaagtaacaccttgagatatataaacgctcgttccacttaaagaacttgttgagcaattagttaacgagatagggatctgttgactaattttattattttttatgtcattagcactaacagaactagccccttcaccactagtgaaagtaatattatctggaacaacaatttcacacgttttagcgagaaaaacgactgaaaaattatatttcactgattgcgctgcaactgaagcccaactcgtcaataataaacaaagactaactattaatattgacactttttttgtctgcataattaatcctgaatatattcaaataaaatagtcgccgttgaatcaccaggtgtcattttattattgttacgtctaacaaaatcgacgatgtagttaatacttatcgctgaattagagtgagaagaaaaagataactttttattgttttctagaatttggcaactcgcattttcaccttcaagacagccttttactaaaaaaccggtttgggtcgtatcgccttttccataaaaaacctgatctgaatattcagtattcgcgcctgtttttacattaatcgtgatttttttctcactatcaggttcatactctttacaatcgataagataagtaaattgcttagtgccgagactccctttaataggcgcctttattggtgtgtcttctgcatcaccaatagtaaaaaactgttcaaatgagacatgtttactcagctcattactatcgctaaattcacaagtgccacgtgttacattagcagaaaagttgagagtaccattatttgcggattgacagtttactgcatacaccatcatcgctaacaatactgttcttttaaagttttttattgtagacactttctccgcctaaatcgttgataatatgaatattaacagcacctgttttattacttaccacatagtttttagaagaaaatggttctatcatattattaattttatttaattttatcgtttcatttttaacggtaatcttaaaaagattaatataataaggcgtagggttctcaatactgatcccattaggcgttgcttttacaactaatttatcaccggcttcttttgggtttatcgctaaattaatagggcgataaaataccttgataatattttccatcgctatttttatcccatcttcatttttatttgttgatggaatatttcgcgagtggaagtaataaagtgattctctatctttaggaagatttgttggtattatttgaatttttattgtattttcactttccggagctaacctgaaaatgtttggagtaataacaaacataccactcaaaggtggtgatgaggtatccagtttttcggttataaagttagagactaaataaggttgtgcattattatttctagcgctaatagaggctgtattagtatccccattaataataatacgagtctggcttaaaccgacaccggcttgaacctgaaatgataaaaataatactcctaaaacacacaacgaaatatattgaaaaaagcgtattttgtttaccatctgcctatcaccttattgcactgcaactttactattggtagtaaaacaaaattatggaaaaggaataaattcctttcccataacatactaatattagttataagcaacactaaaggttactggaacattaatatcttgtgctttcagtgagtcaccagtttctgtagcaaataaacctgctttcataggaataatcaggttaccttcaccttctgcttttaagttttgcagttctgttgactcatttggtttcagtactacagagttcattgcagttaacttgataccagcttgagttgcaccagcgctagcaaataattgctcattaccaactaggccattaccgcttgctaataattcaatattagatacagttacagcaggatcttcaccttcagctggtttaccaatcttagtacagttgtttaacactaagttgaaatctttttcagatacagcttggttaatattttgaatatcagtagttgcataagtacctaaatcaacacgatcttggcttgcgctgatatcacaagttgctgcaactaaacgtgcagaaaatgtaacgtctgcgtttttagcggccataacttgagttgataaagaacccataagaagtgcaccagcaaccattacgcctaatttattgaatttcatattaacttctcttataaaataatctaaaaattatcaatatcgtaataatttagacccaacgtattgtactaagccaacatgtgatccttactatataaatgatattgatccttacaacgattgtttataacccattaataaaactaactttacatcaaaaataacatcatataatgttgcatttctcagtatttatttttagctcatcagaaaaatgacaaaaataaacattgaaatcacagaaacatcaaatatatatatactcactcactgtataaagtaagcataatatattttttgaaaaaacagcggagttatttaaatcacataattaaatctcaccatattaaaatattattttaagccaagttaaaaatttaatgagaaatattaattcttaaatcagtatattctctgagttggggaaagtaaagcaaccacaatagaaaaaattacatttacttatatataaatttacattatatacatacgataaaataaaaaaacaacctttaaaaacaaatggttatgattttaattttgtttttttattaaaataaccttctgataaatattaattagattatcttttgttgattataaataaataataaaaaccaaaccactctaatttaaatagtcatattttgttatttcttataatttattaatttacttttatgacgcttatataaaatatcttatatagataatctaattatgatatatttttaattttatccattaaaattacaataaaaaaataatcagcatctatacacattgatatataagtatttttattatagtaaatatgatagaacatcatgatagtatcagtatgaaaatattaatatgtgcttctcatttaatataaattaaatactatcacttattaaaactatctattagtcatataattatctatcctagtagaattggatattttattttttaatttattgtattatttgcatttggctctaaaaaaatcctactacgcttatagtaataatcattaaatgatagtttttacggtacataatttacctgattaaaaaataagttttaaaattaagttcagtgtaaagaggagcttcaaacacgaaattgagattttaatggaggaaatatgaatattctcgtcattggcgctaaaggtcgagtaggtcagcgtttaatcgaaatattacttgctaaaggtcatcatgtcataggtacaacccgaaaattatccgacacatcagtacatcatccctcacagtaccatgaaattgaattggacataacaaagccgttatcatccatcaccgatttattgccagacaatttagaggctatctattttacgacaggctcccgaggaaaggatttattacaagttgatttacatggtgctgttaaaacgatgcaagcagcagaaaaaaaaggaataaaaagatatattatgctcagtgcgattaattcattatcacctgataaatggactgaattaattgattattttactgctaaatattttgccgacctctacttacgggatcgtacccagttagatttcacccttgttcaagcaggctatttaactgaaaaacaaggcacatataaaattacgaccaaattggaagataatgctacaaaaggtgaaatcactattgataatgtcgcggcaacattagcagagatattagataagccgaatacatttaaaaaatgcattcctatattagatggtgacgaggcgattaaaacagccctcagtcgaatttagaaacgattagtttactgattttgataaaaaacaatctgaccctgatagacattagggccagatatgttagtcacgagctagcttatcaatgtacacaaccattgtttgttactgacatttataaacttgtccactcattttgctatctagtggcgcaaagctatcgacaatgctacctgcacctgtaccaacattaaaaataacattaccacccatagcggctgctttgttgcgtaaatcattagcagcaccgcgtagtgattggctttcagtacgagagcctgataaccaattattctgaacgccggttactgtgcctaataactggcactcgctgcctggttgcgtatcagtaatttgtacctgtgaacctgcactggtcaatgtatttgttgcagaacagcctgctaacaacaacgctgcagtggctcccaataacaatttaattcgcatgatcccctcatttctttgagtgtccgtttagtcatgacaacaatataccctgtcactcctcttaagcgcaaaaataaatcatcactatcttacattagcctatagtcttaagaggttatttccacttgttacttattttgatttaatgatttagctttaagatagacaaagcaatatctatttattttacaccgctttgcggcttttaaaacatattgtgtgcttttcagacaccacagtgcgagactgggcacattatttggtcgtcgttcttagcctaatcctctgctttaatagcataatcaggcaataggccattgatagaaattattttttgatacttaaataatagggaacattaaatcattatgtactggctcaataataaatttaacattattgctatcatcgttggtgtactgagtatttttactattttgattaatcaaagtttggagcgcgaatatgttcaaatgagccccaaactagaacaaatcgtccatgaaaaagtgagtagcttaaaaaaatcagtcgttgatgcgataaaagggaaaacttatcaagctgctgctatagatatcgaggcagaacagaggcaacaattgttaaagcggatggaacaaatcaaacaaattggtgtagttctgagtgtattagggattatttttactgcaatttcatttattcgacatgaaaataaatactcttgtcgaatagccttagcacttaatggaagtatcctgtctatttctcttttaatgtatgttgcaacaagcattgctagtattgttaccatattacttcttatatggctgctaggtaatatcttcggtttctgttaaagacaataaaaatgatataaacagccagaacgacttattatgtaaaaaaacccgagcctaagctcgggtttttggtgtaaaacagctagctgatgaattacatcatgccgcccattccacccatgccgcccattccaccagcagcacctaaatccattttttcgtctttaggtaaatctgtcaccatagcttcagtggtgatcatcagacctgcgatagaagctgcgaattgcagagcagaacgagtcactttagttggatctaagatacccatttcaatcatatcgccataagcttctgttgcagcgttataaccgtagttaccttggcctgctttcacatcgttaactaccacagaaggctcttcacctgcgttagcaacgatttgacgcattggcgcttccattgcacgtagtgcaacacggataccaactgtttgttcttcgttatcacctgtcatttcacgcagcgcattagcaacgcgaacaagtgcagtaccaccaccagcaacaacgccttcttcaactgctgcgcgagttgcatgcagagcatcatcaacacgagcacgtttttctttcatttcaacttcagttgctgcaccaactttaattaccgcaacaccgccagctaatttagccacacgctcttgcagtttttcacgatcgtaatctgaagttgcatcttcgatttgttgacggatttgagcaacacggccactgatagcctcttgttcacccagaccatcaatgatggttgtcgtatctttgttgataacaacacgtttcgcttggcctaaatcttccagcgttgctttttctaactccataccgatttcttcagaaatcacagtaccattagttagaatagcgatatcttgtaacattgctttacggcgatcaccaaaacctggtgctttaaccgcagcaactttcacgataccacgcatgttgttgacgactaatgttgccagtgcttcaccttcaacatcttctgcaatgatcagcagaggtttgtttgctttagcaacaccttctaaaacaggaagtaattcacggatattagagacttttttatcaactaataggatgaatggattttctaactcagctgtacctgtttctggtttgttgatgaagtaaggagacaggtaaccgcggtcaaactgcataccttcaacaacatccagctcatcttctaagccagtaccttcttctacagtgatgacaccttctttacccactttttccattgcttgagcaatcagagtaccaacggtttcatcagagttagcagaaatagtacctacttgagcaatagctttagtatctgaacatggaacagacagttttttcagttcttctactgcgcccacaacggctttatcgataccgcgtttcagatccatagggttcatgccagcggcaactgcttttaagccttcggcgataattgcttgtgctaacactgttgcagttgtagtaccgtcacctgccgcatcattagctttagaagcaacttctttcaccatctgagcacccatattctcgaatttatcttctaattcgatttcacgggcaacagaaacaccgtctttagtgataacaggtgcaccgaaagatttatctaaaacaacgttacgacctttagggcctaaagttactttaactgcatctgcaagaacattaacaccacgtaacattttattacgagcgtctataccgaatttgacgtctttagctgccatcgtatatttcctttgaattcgttcagtttaagaagatcttaaaagagaaaaattatgcttctacaattgctaaaatgtcgctttcagacatgataagcacgtcttcgttatcaattttttctgatttaacaccataaccatcgttaaaaattacgatatcgccaactttaacatcgagtggtttgacttcaccgttttccataatacggccgttaccaactgctaagatttcgccacgagttgatttacccgctgcagagccagtcagtacgataccacctgctgatttagcttcgacttctttacgtttaacaataacacggtcatgtaatggacgaatcttcattaatagatctcctataaaaaagtccatatcaggattaaggttgataccagtgcctaagatgaaccagtaccatgacgatacaagtgggggcatccaataaaacttcaagggggagaaaagtgttttttttcaaaaaatcccctttttagatgattatgcttatagttaattattttttatcagaaaaatggtcattatcctgatgttcatccttattattcagttgcttactaggtgaatcttctttacgttgatattcaccttcaaaagtactcccaccttgatgggaagaaaagccatttccaccctgtccgggggtataaattttgatacgcgtaatcagttttgttaccaatagcgcttgtaatgggggtaacaataaaagtaagccgaggaaatcagtaaagaagccagggatcaataataaaatccctgccaacaccaacgaaacgcttttcaccatttcagccgcaggcacttctcccatggctaatttttgttgcattgaagcaatatttttcacaccttgatttttgaccaaagagatcccgacacaagaagtcagtaccactaggaatagggttgtaagaacgccaattgaagaggcaacatgcacaaaaatcacagcttctatataaataagaaggcagataacaattaatgggagccaacgcacttggttctccttttataaaaaagattcatattattaatagaaaggagtgtgaaccacctctaagctaacagcttatacactcgctttttcttagtttatctacataataatggggagcctaatcctccttttcaagggagcataaaaagagaagtagaactgtaaaatccatgagatagatcacaaaaagaaaataattcagcgttatttacttataaagtgatccagcttaaaggtatttgcttacaacccgaatatgatcgtgtcagtaccaagcaaaacggtaagttatattacattattaaccgttaacgatatattttattaacaagcgcataactagacagttaaaattttaataagaaggttctcatgtcaaataaaactcgtatcgaagaagacctgttaggtaaaagagaagttcctgctgatgcttactacggcgtccacactttacgtgcaattgaaaacttctacatcagtgatcgtacaatcaatgatgttccagaattcatccgcggtatggtcatggtgaaaaaagccgctgcattagcaaacaaagagcttcacactattcctcgcgaaatcgctgatacgattatcaaagcctgtgatgttgttttagaaacaggcaaacacatggatcaattcccagttgatgtattccaaggtggtgctggtacttcattaaacatgaatactaacgaagttatcgcaaacatcggtttggaattaatgggtcatcaaaaaggtgaatatcaatatctgaaccctaacgatcacgtgaataagagccaatcaacaaacgacgcttatccttgtggtttccgtatcgcagtttataactctgttattaaattaactgagtctattgagctactgaaagcaggttttgatagaaaagcaactgaatttgaagacatcctgaaaatgggtcgtactcaattacaagatgctgtaccaatgactttaggccaagaattccacgctttctcagtattaatgaaagaagaaatcaaaaacctaaaacgtactgctgaattactgttagaaatgaacttaggtgcaactgctatcggtactggtttaaatactgcacctggctaccaaaaattagctgttgaaaaattagcagaagtaactggtttaccttgcgttccagctgaagacttaatcgaagcaacctctgactgtggtgcttacgtaatggttcacgctgcattaaaacgtctagcagtgaaaatgtctaagatctgtaatgacttacgtttactttcttctggtcctcgtgccggcctgaaagaaattaacctgccagaattacaagcaggctcttcaatcatgccagctaaagtaaacccagttatcccagaagttgtgaaccaagcttgctttaaagttatcggtaatgatacttgcgtcaccatggcagctgaagcaggtcaattacaattaaacgtaatggaaccggctattggtcaagcaatgtttgaatcaatttctctattaagcaacgcttgccgtaacttagttgaaaaatgtgttgatggtatcactgctaataaagaaatctgtgaacacttcgtatttagctcaatcggtatcgtaacttatctaaacccattcatcggtcaccacaacggcgacatcgttggtaaaatttgtgcagaaacaggtaagagcgtacgtgaagttgtattagaacgtggcttattaactgaagaacaactggatgatatcttctctgttgagaacctaaaacacccggcttacaaagcaaaacgcttcgatgattaatatttatgtttcataacataatcatgttaaacataagaatgagctcttaaaaatacaaggcacggactctttaagagacgtgcctttttacttgattgtaaaaacaaaaatttaacttatctttctcatttttttaattatctcaaggagtaaacgctatgttagccgtagaattgattatcgttctgctggccattttcctcggtgcgagactaggaggaattggtatcgggtttgccggtggtttaggggtgttagtattagccgctatcggtgttaaaccaggtacaatcccttttgatgtgatctccatcattatggctgttattgccgcaatctctgcgatgcaggttgctggtggtttagattatttagttgatcaaacagaaaaactattaagacgtaatcctaaatacatcacaatacttgcgccaattgtgacttatttattaactctctttgcaggtacaggtaatatctctttagctacattacccgttattgctgaagttgctaaagagcaaggcatcaaaccttgtcgcccattatcaacaggtgtggttgctgcgcaaattggtattacagcatcacctatttctgctgcggttgtttatatggcatcagtcatggaaaaccctgcaatggtcggtgaaggtaatacagtaagttatatcactctgttatctattttattaccagcgaccttccttgctattattctgatgtcattcatcatctcttgggtatttaactcaaaactgtctgatgatgcgatttatcgtcaacgtttagagcaaggtctagttgaattacgtaatagtaaagagcgtagagaaacattaccgggtgctaaatcttctgtaatgctattcttacttggtgttatttgtgtggtcacttatgccattatcaatagcccaagtttaggcattgtaaaagagccgttaatgaacaccactaacgctatccttatcattatgctgagtgtggcaacacttattactgttttctgtaaagttaaaacagataacatcttaaactcaagtacatttaaagcaggtatgagtgcatgtatttgtattctgggtgttgcttggttaggtgatactttcgtttcaagtaatatcgattggatcaaactgactgccggtgatttaatcacaggtcatccttggttattagcggttattttcttcttctgctctgccttattatattcacaagcggcaacagcaaaagcgttaatgccaatggctttagctttaggtgtttctccattaacagcgattgcatcattctcagcagtttctggtctatttattctaccaacttacccaacactggttgctgccgttcaaatggatgacactggtacaactcgtattggtaaattagtctttaaccatccattctttatccctggtactatcggtgtgatattagcggtcggatttggtttcctcttcggcggtatgattttgtagtttaaaaccaatatttaaaaagacattgcaaaaagctttactttttaactagatataaaaataagtcccctcacccaaatggatgaggggatttcattttgacactaccccactcgcggctgttactttcatttctgattaaaatctgttaattatggtgctcttgcgacactatgatttaaggagatttccgtgcaacgtgaagcattattagaccacgtacttatccaattagagcaacatgggcttgccgctacgttgcctgagttattgcagggatttgatattactgaatctgaactccaacctttttggcctgataaagacgcgttaatttttgattgtctgcgccatcatggacagcaaattgatatttggcaacgccaagtgatgttagatgatacgctgaccacagagcaaaaattactagcacgttacgatcagctggctatgcgcttagaaaaaaatcgtttcccaggctgtttgtttgttgctgcttgtagtgcttatcctgatgagcattcacaaatccatcagttaagccagcgccaaaagcaaagctcatttgaatactctagaatgctactacgcaagcttgatcttgaagatagtgagttagttgctaaacaaatggaactcatcttagaaggctgtttaagtcgcttaatggtcaatcgtcgtgctgacgatatcacgacagcaaaactattagctcaagatattcttaaaatcgcccaatgtcgtaaaaatggtgcgctaagctgattgcatatcaatattgcaattagagtaattgctcatttcgttctcttattccattactctcgatgagaggaagagcaaagcggttaagtgataagcaaaggaaaaatatctctttaaaagataaaaatggactatctttactgattgttatttaagcattttttattagaaaatcgcttatgctgaaaaatcagactcaaatagaataaaaagagagcaaacaaacttatttttgcattttttattaaaaagacgttgacgcatcacgctgaatacggtttaatgcgcctcgttgcccggatagctcagtcggtagagcaggggattgaaaatccccgtgtccttggttcgattccgagtccgggcaccatctttcctttcggaaatggtgtaaccgtttccctagcacggtcgctggaagtgagatctccaacgctcggttaaaacttgaatttcagttgtaatcacgttcatgacttctcacgtggttgacaatgatttatcaagtaagggtgttttcctagaacacccttctcaatcaaatccagcttatacacaaagttgataaaatagtcaactttgtgtaaatattttttatttatatcacatcctctgtctttttgatgctagccttgtaagttcaccacctaatcccattgttaaaaactcacctaactcattctccaagatcctgactgtactgtatgcatccagagcaatatattccatagttgaagagagactacggtgtcctaacatctgtttcgtcaattgcatattacgttcaggatgtttcattaatgtcgtcgccagtgtatgtctgaaacgatggggactgacatgaaatccacattcctttgataaacgacggaaaaaagaacgtatcgtctgactgagtggagtttcagagcgggatagtcgtttatgataaagacgatgaacatcaaacaaaatatcgtttttatccgccccgtgacaacgcatttcctcaaccaagggcgccagtaaacaacgtagtggctgaacaaaagcaatctgatattcccggtgatttttactgctttcactgcgcaatgtgatcgtacactcctcaaaatccagatcgccaatatgcaggttaatcagctggttaaaacgaatagccgtcagcctcagcgtttccagcacagcaaaccagaatcgagtgggataaaccgcacatgcctgaaagtgagcctgatcaggtggcagcatattttcctgttgctgaaattgttccagaatacgataaatcgttctcagttgtgattgtgtatagacttttttctgtttttcacccggttcaatttgtgtttctgagaacgggttttctttaagtgaaacaatcccttttttgatccaataattatacagagactgcatatgcctggtttttgtgttccatgtccgttcccggactttctgaatattcagctcatttcttcgccatctcagcacatgctcatgtgtcacttcatccggtagcggtaacgcattttcacaaactccgcaataacgcagaaaaagacgtaccatcttacggtatgttttctccgtatccggccgtaatactttattgtaaaagtaattactcagcatttgctcccatacatccactttctgctgatgttcatcagaactgtgattatctttcataaacacctcctgcttttaacttccgacaatacgaataaacaatgattcctccggcatattcatgccaaaaatctgacgtcctttaatcatgtaaccattgatttttttatgggataacgtaattaatgttttgttatcactcagcggattcagtttttcaccataaattcgagccctgaaatgccctgtttgtcgggtatcatgacgaataatccggtgcaatttaagggattcaaaagaagaaataatatggccgatatcatccggatttttacccgcctcctgtatgtactgataaaaaacagccggactctggcaaaacaaatactccatgacacagtgaaccttcgcatccggcgtatttattgccagttttccgcccaataatccggacttaaaccacgcccagaaagcctctccttcattttttatactcagacagttttcgcgctgttcatccttctcatcacgattgcccgtctgagtatcagataagatttccggcattaaacctgataattcaagtgcatatttcatatcctcagataacggaggagacatatctgagacagttttttcatcagcagaatcaagtgccccatggacaaccgcaccttctgcttctgcaactaccattagcggtatatcgcagtgaattccgttctctgttttttctgaagtaacagactccggaggcaatacagatgttacagacggagtttcaggttgtggcttttgcgccaattcagcaggcgccaatgacgcgatatcattctccggctgccctgatagcactgaagacgaagcatcaggcgctgacatagaaacaacggaagaaaatgccggcaatgcaccggcggggaacgcagccagagcctcattcagcacacgctgtaaatcattatcaccgtttaccggctcggtcaccacgtcagacaacgcctgaagcgcctttggtgtacccgacaaccagtggattaccttctccggtaatagccggaaagccatcatggcccccgtcgtccggcgaaaatgcgtcatatccggcaccggctcatgaaagcgaaaacgatacggtacggtgggcgcactcatccccggctgccacgccgacaggctgttcagttgtccctcaaactgtgccgttaacggtaaccagtaaaacagtccggtataaaaaacacacacattccaggcgctgaactgacggctctgctcttccgacggaagcccgcggggcagcatctctttctgggacatccgcatacaccaggctgtcgtattcagcgttaaatccagcaatcccccttcgccggcatatttcccggtttttgatgccggcacacactgaagtcgttctgccagcatctgcaaaggagacaggcaaagtgcccggtactggttatccggtaacgctaccacccggctgatttgctgtaaccagttttgccgctgcggtgtggtcagcaatacgtcagctgcctgcggtaaataaaagccgtcactgtcacggataaataatggcctttcctgcgtgtttcccggggaaacacgcaatgttttctcttccgctttccgggaaagcgatttacgaaaccacggtaacatcggtgttactgcctctttaattcggtaaaaacaacaacgcaacattaaataaaacataaattattttaatatcaggataagaataaataataaatgcaccttattttcattacgttaactcatccacaaaaataattccggcaacaaaacagaagattacatgaataatgttttattattctgtctctgtctgtttctgctgccaggcacggatggccttttcatacgcgtccgcattcacatgctcccgggtcattccgcattgcagaatattttcccgacctgaccagaagcccgcatttctgtttctttccaccaactgacattccgtcaggtaataacgcccccactcagcctggcgctgttcatcccagaccaggaaaacgcccacaaccagaatcagtggcaacaaaagtccggctgtgacaaaaaaaggaaacagaatttcattccaaaaatcctgagcccactccctcacaccctgcccaaattcacatctcatcacactctcccccatctcattcaatgacggcatcacgataacaatgcgggaataaaacaaaagccgaaattagttttccgaaaaaaataaaaaaacccggtatcactaccgggttttcagtcagttaaatcagtacggaaacctcaccctccgtaatgtggcaatgaatcaagaatatagtccggtcccgtcacatcctggaaaccgtcctcattctcttcatcactgaactcaatctcatcagattcatggtcggttaaccggccatggtcatactcgctgtatccgcagaaaccacagccttcttcggcatagacatgacggacctgacagcggaaacgcgcagacagagcacacaaaaccgctgctgacggcggcccccacggagtatcaaactctgcggataactccgtcgcatacccgccatcaatacagtgaaaaccactgccgttcggccatttcacaccataacggcactgataaaggtgatatgtactgttaccgggggcaaacgcctgccagcgcgcctgccgccagatgacctccggtgttttccataaacagccgttaaaaccgtgtaattcagccgcaaggctggtcggtaacagagtccgcatatccatcggtatggcttctccggtactgcgaaggtactgaatatcctcccaggctgtcgccacccggctctcatcctctccggtaaaccggttaagccagtcaaaactgcttcccgataacaacggggacagtctcgctttctgcgtcgccgtcagcgagtcccaggaatggtacgccccgccttcagataaccacatctgataccactgatggatttgctgacaacatgacggtgtcaaatccggtgcagtcatcagcaggtcaacccagtgcgtgaaagccgtgtttcccggggaaacaggcccggttgcaccgtatgaagtcagttccggtaacggcggaaaagacagcggtctgaccggtttcagtatccccgcgcagccggccagcaacaaatgcagactttgtgctatcgccgtctgccaggcgggtatcccatcatccgcatatatccagtgtttaagagccggcatatccgccgcgttgtgtaaggtgatgtcaagtcggttcgagcaccagtttggcatgatgatgtcctcttttcagaataaaaaagagggcttatcccgtgaggaacaagccctcacgggaaagatgtcagtcgttaatcgttaaggattatccggcatgacatccgggttaatggcaccgctcagctgagcctgtgcaagtaaggcatcgctgtcactgacatacggggatgccggcagataacaggatgcattcagtttatccaggtggtacttatccaccagacggttgaccaccgataccggcgatatcccgagttcaatcatccgggacacctcagcatcatcggacaatccggtatcactcagcgtaatgccgtaatgcacttgcagtaactgatgtaccagtaactgaaagcggataatggtcattttgttcatcgcagtctcctacgcggcctgtcgggatgcggccacattcagtaaaaactcacaggcctggcgggcctgcccggcggcccggaacaacgcttttttgtccgatttcagtacccgcagccagctgtcaagatagctttcatggttcacttctccctcgacgcttaactgcgcacaaagaaaagcgctgcccatttccgcaaccagctcctcaaaactgtacagcgggtcaccaaacttcagggacgatgaggtgatgccttcacgggccagcctggacggatgaccggtactgtgcaccaactcatgcagtaaggtggcctggtaatcggcattccggtcaaactgtgacgacagcggcatcacaatccggtcctgtgacggactgtaatacgcccggttctgcgccgcactggtcaccttcacgccgctggcattcaggatatccagcacccggtgcgtggccggcagggttatccctgctgtctcctctccgggtagtcgccggttttcgtaaaaatgcgccggcaggtcatcacactgggctatgttaaataacggattcgcctttatcatcggcacctccgtcatcaccacctcaccgtgttcatcccgcagcagctcaccgtgacggtcttttgccggcaccttcaccggtttgaatatcacagtattcgtcgccatttcgcctttacggacatggccacccagttgctgtgcctgacggtaagtcagccagatatcgtaaccaaagccctgctccgccgccgacaaccataacagcagcacatttatcccctggtaggaatgaccggtcagggcgttcaccggaaaaccggtgcctgtcccttccgacggccgccatggtcgtttccacggacgggtgcctttttccagcgcggccacaatacggtcagtcacttcctgataaatatcgcgaaccggcttatccgctgccggacggcgtttacggtcagattttttcatcggaataccctcaataaaaaaggtgtatcccgtcctgacggtgagatacaccatcaggtgaaaaaacaatatggttaattttcaaccggcgtttccagtggaaacactgattaaaatgtgttcagtgcttcccggggaaacaccttacctgattaccaccaggccacaaaaaacagtgactctgcgtcaaagtcaaacgtctccgttatctctgacagccagcgtctgacgccttccacatcagcccagtacgcctcatcataagccgttgaaccaaagaaaaagccctcagtggtcgggaaccgtgtctgacagttttccggtgtcagtgcctgcaagtcctgctgtaaagcccgcagatgggcctctgtcaccagcaccttttcacagttctcaaaagccccgatatggtcatgcacccacttaaacagcgcattaaccttacggaaatacccgacttcaatatcgccgtcgctgtccgcttctgcgtaacgtgaggcgggtatccggcttttgtctgtaccacgcttttcactggcataaaagtaaatatcgagtcccttctgctcagcatctctgacacacgataacgcacacgccagcgtgtcccagttgatccccagctccgcatcaaaatgatgtgcaacatgcgttaatgttgcccgtgtctctgccggacaagccgtttcatcaacataggtaacatcatcggggaaccacatctcacacaagacgaatgcctccggattgcagcgggataaatccgctatcagttcccgtatcgtacaggctctggccattatcctgcctccggtaaacctatcccttccggtaacgtcaggataagataaggaaatacctgactgacatagtccagcaccggctgccagtcccggatatccccgtcagaagagaccgaaaaatatcccgggcacaggttgtacaacaacagtaatgccgcgactacaaacacgtcatagggtttgtatgctgtcttgcagaaatcccagtagtcctctacggggatttcgcgctgaacaataaacgtctcatgattcatgtcatcagccgcattaccgttaaaacaaagcgcctcaccgtcgtcggtgaataatgagccatcattcagccgtttttcctccaggccatcacacaacacaataggtttatctgggtatccgccgcaaatctgctctgcggatatgggattggccagatagtggtgatagagcttgtccagatgttcacggaagttctgccacatcagggggtcaacgctttgtttttgtgtaaaataatgtgtatatcccatgtgataaatcctcattctgattaaaaaaatggcggattcatctcctgacggaaatcaatccgccgggcggggtcataacaaaaagtcaatggtgctatcagtacaacaaatcagcgacaccaggcataacgcacctgtgccagctggtatgtcagtgcaaatccggcacgggaggccgcttttatggaacaaaatgtcctgctgtccagcgaggttatcaacgaatgaaagcggtattctttcgaatgcgcgcccagacgtacagtaatgcggatcctgaactgccggggattcactttcaccaccgtcgcacggtaagcgcgccggccggttcggttacttatccacggtaattcaccgggtatccctgacgaaacaaacggtatacggtcataaaaacggtacagccgttgcatgatcagactcagaaatgaaaacggtttgttttctggcagtaaaacagacatgtgtgtttctccggtaaaaaaagacggagaaacgtccacctgacggggagtttccccgtcgggtaggtaagtaaaaaaagaatgaatgccggcaaatcagtcgctcagttcgataccgacaaggtattcatcagccatctccattgccatccattcactgacggtctcatccaagccggcttcacagcctttctgccagatcactgcatcaatccgctgaccgatatccggtaaacagcgaagcagacatgccggccagggtctcatcagaccatccgcacgccacagtaataatctgccgtaagcaaatccggcatcataaagcgtacacttcatcagcgaaatggaatgagggcggttttgctcaccggcatacctttcagccagtttcaaatcagcctcaacatttcgcagtgtccgggcttcctcaaccagccacatcagccattcccaactccgggaatagcgacagacgtgatcggccacaaagaacagtccgcgggtaatgccataaatcatggttatcaaacctgatcagtaaatggaagcagccccatttcagggtagctgactgacacctgtgagtccgttaaatcagtcggttacatgcttttcattttcgtgttgcaggcagcagcggtaaccccagcgccaggcttcattccagatttccggatcgagccgctcagcgatgactgtcagccggtgaagcaaaaatgcgggggcaccggtttgcgagtccatagtaaatcagggcgccaaaacgaaatgccgttgtatacaaatcaagctcaataaacggcagttctctgtaatctccgctctgatacatccgtttttcgtccaaacgtatcacctccagttcttctgcggtgattttcagcatccgggcatcattagcaacggccttcagttgctgagaaacacgggaatgcggaaataaataactggcaataccagacattacgtgggcaacaccataattcaatgtaaaaagagtcataagggctatcctcagataagggaatacagccctcacgggatgttttcccgtatgggtcataaaatcagtgaatgtccgccgttaagcaccaaacatcagcgcttcaaccggatcttcaaactgtgcatttttgatcgcatcgttgtagatacggcgaaagtcagacgcataaggcgtttgctcagccgctttccagacagcgcggaccattttctcaagatgtggacgggtaaaatcagcctccacagataacgcgcccagttgctctgcaacggcactgattatccagaagtttggcggaaaattatcttcgtccgggtgctcgccaatatccagacggacaaaagcaagaaccatgtcgagctcacctgagaggtgatgcagttgcgtgagagagtgcagatcgtcaaaaaaagacgattccggaaatgtagataccttcattgaatttctcctgaaaaaacggagaaattccctgatgacgggtgatttccccgtcagcgggcaggttatatgaagcgttgcgtaaaaataatcctgatgataacgctattctgttatcaccctccgtcgatttcaaggacgaacggagttctgtcatcgcccgtaggctcccgtctcagatgacccgaggattggcagtggcaatcacccgtaggcgttcctctcagattgccggaacattggcattgttgtcacccgtaggcgcttctctcagacaaccgaagcattggcaagttgcattacgcaacgagataagcagattcatttttagccgtttttttatctttgtcaatcctgcccattcaggatttttaccacttctctgatcacccgtactccccctttacgggtaatatgtattccatcatcagttcgtacagtttcattatgaataacagattgccattgcgttcctaatatatgaggctgattaatatccagataatgaatatttaataacatcgcactgtgtttaattatatgccgggtatgtattaaataacgttcatgttccggattttttaaatgtggtggagatatccagacaattgtcgctaacggattttcactttgaatttcagcaatgaattgaaataccagactgtaatatttcagccattcatccgaaccatattgaacaaaatcatttgttccgagactaataatcacattatcaaactcccgcaaatcgaaattattcacgaaagcgatccaatcttttttacttttatttattaaccccgaaccggaaacatattctgtttttattttttcatccaaaacatattttgctgacatttcataaacagccgttaatgaatcacctaaaaataacgtcttcgccattaacggaaaacaaaaagcaaaattaataaacaaaataattaaacagactttcatttttatcttattcctcaatatctcctttctgactataaacccgtttaatataatcgccacgaccgtcaccatgccctaaatccatggaggttaatgcataggcttccttttgactgaatccctgactgagataatatttttcaacatcctgagcataggcataccgtaaaccatgatttgattcttcgtgaataaatccgcctatccgtcgcatcacattaatataacgatctttggcagaatgtaatgacggacgattaattaaataaccgttatgtttatccgcatattcaatggctttattaattaatgttaatacacgggctttatccggcactaatgcttcacggggtctgcctccttttgtcccaaaaaccacatgaacgcgatctttaccgtttttaagcgcctgttgccaggtccgtaatgattttactgactgcacggcttcttcatttctcaatcccagactacgggataactgcatagttaatgccaccccctgatcataaggctcaatccgagcgagcgcttcgtgaaagcgctcgtccgatatcgcggtacgggtgccagccctgctggcacctgaaagccccagcgcctcattactgaggcgctcatgtttagggtcagccagtttatgacgtccggcaacacgaaatatcgcccggatagccgacatttcgttttgacagctgcgtaaactgatattctgttctctgcgggcatggatatacatttcaatatggcgggatttcagttgctcaacagatcgtatctgaatattcaacccggccagctctgccgcaacccgttctgcaattttgacccggtctgcaatggttttaaagctccctccggcctgacgtgcaaggatatgcatttcacgggacagggcttttgctcttctggacattctctgattctccgcctctttcgctctcaactggttaccttttcccggcgcgacggttttatattgcgcatcctgcgacctgacagatacctgagcaccggggcgataaaaggttgagttgttgagaggtatcaaatcagttctctgaactgtttgcggtcatcagaccggcccccgttatcagggcacctccgtccgtcagtttcctgacgtcgccttggtatcgtgtcgttttttctccttttttcataatgttatacgtttttatcatcatataaacgttgagcgttgaaagactttcagccgttctgagcaatgcattacatgtctgtcagattgtcagttttgctgtaagaccagtattgaagcgttctgagcgtatgcacttgcgtgcgtcactttgtcttcgtttcacttgacgaaagtgacgcacgcccatcattctgctgctcaatgtattgctccgaagatgccgctttccaaagctgcgcaatggaaacgcgtcataccgggcatacaaaggttgcagaaagcaggacgtattcgtcagaacacatcagaagaggcagatacacgttatcgcatactctgcttttttgtggatatccgggtgaccggatagctgtgacatggtcactgaagtgcagttaatcctgatgataacgctattctgttatcaccctccgtcgatttcaaggacgaacggagttctgtcatcgcccgtaggccctcgtctcagatgacccgaggattggcagtggcaatcacccgtaggcgttcctctcagattgccggattggcattgttgtcacccgtaggcgcttctctcagacaaccgaagcattggcaatgttgcattaagcaacggtgtaacgtggtaaatttaatcaaactttcttttttcgtcaatacccgataaagaaaaaggagaatattttacatcctcctttttctctttattaaatatccccttgttggttcttcatcgtattaataatcaatgccatctttaatcacgaaaactcaacaatcagatatgtttttatttggatttatcataaacatcccaaacaggcggtttatttttcatagagtcaacagaaacacgtaagaagggcatattagttttaaatgttaaaataaaatccaaggacattctattacaaacagaaaaaaaacgtttttgttcttcatcagtaaaatttttttgttttgggaatataaataaactccctaaactaacctgacaatgtatataacatttctcaccaaaccagctcactaacttatcatgatatttttttcagtaatcgtagtcaaatattcttttctgtaaaatttaatacctctctcgatcattaaccaaaagaaactttctttattctcagaataaaaattattacaatccccattaccttccaaagcatcattgtcattttttttattatataaacatcctttgttaccatttaatgttgtttttctccttgagtattgcttccttattttactgaaccaccccctcctcctccacaaatatcccgcccctattaagaccacaaaccaaaaaataaaattcatattatcatctcctatatacaaggactcggatacatattaaaaacttacttaaactgacataaaaaatcaaattcaataaatccatccagatgaaagaataagatttttatatgaaggcaacaaaaaagttatacacatacccaccgccaccatcagggccgatgccctgtacgctcccgtttacccgattgcttgttggcatcgggttgcactggcttggtgaccgtggatatgtgcataactcacaagatgtagacaatgattaaaaatcgacctaaaattgtattaacgatagacgacaagcatgagataaatcagactcactgattaccggagggggaaatgagtgataaaacagccgcttccagaggagaacgctggggcataaaagcagcttataaagcaaaatggctaatcaaaaaattgaaggctttcgataagaactgtgtggcaagcgccaaaagcaaaaatatgccgggttggctggggcatattccactggtatctataactctcgcagtcatcgcgttactggcttatttcagtttgtacatcctatttacctttggagcgttggtgattttattttctgtaatagaacacattgatatttcttcaggaaataacattcaatccactgataacaataatgaatggcaatccaatctcgttggcaatagtgacgactttagaaatggcaaccaaggttttggatattatatgaacggaataaatattgacgaagattagccagccacaaaactaaattttgcagctggcttcaaaatattattagttaacttttttagaaatagcttgttctgctaactgtcctcctttcccccccgcactatgcgcaggtgaagtcgcgttagatgtcatattacctagctcggacccaactttagctccagcccaaccaaatgctgtcaaccacaacgccggcaacaccaaaaacatcgttcccattaccaggttcataatgacatcatcagacgtgttctgaagcccgttcatattccactgactgtgcgtatcggaattatacagtgcctccatcatccagctgtctatccagcgtgccagctcccaccagaatgtcagaaagttcagcgcaaatatcacaaacgtcaccgttatcgccgtcttaaattcatacgccgaaaacatcagcaccatcgggatcatgatatacaccgccattaacatcagcccctgcaccatcggtaaggactgtcgcatcgtatcaaaggcagggaatgcccccagtgacgccagcgaagtcccggctacccctcccattctggccagctcattcatcaccgtcatatccgcattacccccgtatccccggtatacccggccgccggagacatccagattcgccggactcaccagccggcggacgatggcctcctcaaactctttcgagtttttattaatcagcttcatcgccgcccgggcacgcagccacatcccttcatcggtctgctctttgacaagtttcagtaaccctgcattcgcatcattccaccactgataacaggtcgggtaaccgttgccgttgacattcgcatacccgtcatcccggtcggcatcccagggaaagcccgcccgcggtgtccgtgactggatctgatgatattcccctttcataaaggtggccgagcctatccaggtgatatcctgtaacgttttttcatcctgtgtttttccctgatctttcgctttccagtcatacagggcacgtgagtaacagtcatccgtaaaatcctgaagtgcggcagccagcgccggatttttaatgttgctgtgctgcacctcaaaacgcacctgacgcaaatccggccggcacggaatgctggccaccgccgcctgagtcacccctttcgacagcttatgtaccagcatccaccacagcgggattttggctgtctgattatccagtgacgacaccacgccgctgtaaccggattccgccggcttcaccggggtccaggtgccgcaggttttggtccggctggtatcaaattgcagggtactgacactcacctccatcaacggcacacaacaaaacaggatcaccacaaaggcgccgtaaagcgcgttctcgatacgcacaattgccagtgaacctttgttaccctcatcctccccctcttcccgcactttcagccagatccccagcactttaaagaccagcggcagcgcaaacagcccggtgctggtcagtaccgaccacaatccgttattcaccacccaggccagcagcgtgagaaaatactcgagataactgtttgtcatcataagccgtcacctcccgcccagactgaccattcactcaccgccacaaaggcggccatcgccagcccgctgcgcttcagactgcgccgggccgtctcactgactttcgggtggtgatacagtttccataatccaaccgccacggctccgtacaacacacaccgccagaccagccagaaccagcgggcacggtaaaacgcccggcgcagactgtccgcctcaccgtaataactcagccccagctgagccaccgccagcaacaccaccatactgagcagggtcagcccggttactttcagcaccggccataaccggcgcccggtttttcctttcgtcatttaacgtcctccggtgtcactgttttgctccagtccctgtacacgcacatccgtattatctggggtctgggtggcagggttcgcctgtgtccgttgctgatcacgctcaatcaccgtcagcatcgcgttattggcaatggatttacgcacttccatttccgtttgcagcatcccgatttcgcgatccagctggtcaaccgactggttaccgatctcctgggctttcggaaaattaccggcattcggctccccctggccggtgatcagcatccggcgcatcgtcagcgccagctccatcgtgtccgccatcgccagctcaccggccagacgctgtgttaatgccgttttatccggatcccggcgcagcgcttcaatcaccccccgggagaccgtcaggctgccggttttcagtttcgccaactctgccgccccgaccgcgccccggctgttcaccagtttatgcagctgttccaaattttcccgggtggtggtctccagcaccggtgccagcccggttcctggctgggaactgcccggttgctccgcctcaccgccgctctgacaatccgccggattggtgcaggtgcggaccgatttgctgcccagcacctgtgtgaccacctgagcggcttcctcactgttggcaaagcgcctgcaagcggctccgttacactggccggccggcaccggggccgtactggttgccggcagaccgttcatgatattaaagccggcctgtgcaaaatcctgcgccggctgaatcgcaggctgaccaaccccaccgcgctgtttcccgcctatccatacaacccctttatcgccactgctttgctgaatttgctggtcagtttttaccgcatccccgtcactgttattgatgatattctttgcttcttcgaggatcgccgcctgcgtccactgattattttctgaaaagtccatcatccgtttagccatgttctgacagttcagctgcgccttatcaaacgccacattagcctgcaacaccccgttggtcagcatttcatacaggccgggattcgcccgctggatagccatcgccggcagactggccaccgccccggtggcattctggatcacctcactcatcagattcttaaagccggccgtcaccccgttcagctggttgcccaccgtggttttgatatcaaaattgccgcacatcagatcactgttccagcccatgctcatccccagacgttgcagattactgcgccccggcggctgggataacaccgtgccgccgcccaggttgtagtacagtttgtcggagaccgcgccggaaacatttgcgccgtagccgatatcattcgcaccggcagaaaaatccagcccggcccggacagaaaatgccggtacactgcataacaccatcagtgtcagcgccggcggaaaaaacgtgtgtcgttttgctttcatcatcttaaaatccctgcttaaaacgttgtgctgtacagaaatttttgccccatgcgcttgcagcagctgtacggctgccacaatgcccaggcataattaccgtcctgtgcctgtgctccgccctcatccggaaacaccgcacagctgtttttcagccccggcgacaggcgctgccatttatggttttttgtcccggtattctccgtcaccgcgtccggcggccaatagccatcccggcggttgcctttcaggggcacataggtatgcgcctgcccggtgcgggtcataatatctgccacgcgctgcgccaccacagccgccgctttatccccgtcctgctggttgacaaaaccgctgcgcggatagagatttccccacatgttgccccggctctgccccccgatttcccgtttcccgggaattatcgcttccggatacgccatttccggcacaccgagccgccacggcacactgtcgagcgtgctcaggtaataaggaaacagcggtgtggctgcgctgtcacaggaataccccggaatactgccgccgataagggtggttgccggatgaccgatagcatccgcataaaaaaagtgcagggcggttttacgttttgcctcaaacttctgttcactgtttccgcccccggcagataccccgctcagcacgccggtcacggcattttcaatcccgccggccgccccgctgaccagtgacatttcccgccacgggttttcacccggggcatggtaggccgagaccaccgcctgcggaataaaatgtgacacccggacagatgtccggatacggcagccgccccagccacacttcagccagtagcaaatcccgctgatacgccagctgatacacgacggtgaggccgcagaagcgaccagagtggcggtactcagactggcttccgccaccggcaccagtgaacaaccgagtaacaaagcccccgccagacgccggcgatgtgattgtcgggtcatggttgacctcctccttcctgttgttcccggtactgctgtatctgcgtcaccgcctgtgcaatatcggtggtgccgtaaaccacccactgcgcatcaacgacgaccgccggcagagatgacacccccagctgccaggcctgaaccacgccctgataagcctgccgtaatgccgtttctctggcctgccaggccggactttgtaacagggcggtgatgtgcggggcatccgcttcactcagttccgtccccggctgaagcagggcctcatccagcaggcgttcaggcgcatccagatacaccacctcaaacgggatgtccgtctgcggcagagcgtcatcctgcgtggtatacagcaccactgccgccccggcggtcaacggcaggcatgacagcgacagcatcagcaatccggaaagagataaaaatcgttttttcattcggtcagtcctcacaaacgaacggtgagagaagaaaagcgcatcaaaacccgccggtgaccggcgggttttcaccggttaccagcccaccgcaaacccggcgccgatactggtatcgccgccgttattccatgacgcattcaggcgcacattggtattggccgtcggcttatactgcaccccggtggctatcgcctgtgcatcacggtaatgccccatcgccatcccgaacgaaaaacgctcactgttcacatacggaatggaagatattgcggtcaccccggcaatccccgcattggcccgtttctccacctgactgattttattgtccagctgactgaaacgctggtcggtatactgccgggcattgtccagcaccgtgtgggtcacctgcccgaacgtctcatcggtatagcggtttgcggccgccagggtctgttcctccccctcaatacgggcctgctgctcttccgtaatccgcttgtttatcttcgcctcactgtactgaatgctcacatcggtgtagtccatggcctgtttcagcgtctgcttatcgccggcaatacgcgcatcccgctcctcatccagttgccctttgttgaccgcatccgtttttgcaatgccggccgccacatgcgtcagaaaacgttcctgaccttcacggccgacggacacgctgttatcccggtcagccaggctgccgtcccccagtgccacactgtttttcgccagcgcccgggcatccacacccagtgccacggatttttcgcccagcgccagactcttatccccgaccgcaacagcctgtttaccctgactcagcgtactctgcgcctcattcagggctttatccgccgcctgatattccgcctgtttctgcgccagttcggctttcaccttctccagatcccggatgttttccagctcggattgcgtcggacgcaaatcagacaactttgtatccagcgcggagagatccttttccagccgggagagttgcgtttctgcctgcttcagtgcctgatcggtgacggctttttccgccgataactgctgtttcagctgtgtggcctgtgacgacatggcctgtgtgtgactgagcgcattgtcctgaaggtactgatccactttttgtttcagcgcctccgggttggtattcagcccgacggtgttatcccggggacggctttccagtaccagcagttgctgtaactctttggcataatccgggctgtccggcgataaactgttgaccttatccagctggatcaggtagttcagctgattctcatagcgggtgaaaataccgctgaccatctgattaaaggtgccttcatcgatgttatccagatacagctctgacaggatctgcttcccggcctctgtcaccccggtgagcccctgctcaatttgctgccaggcatttttctgataagcctgatacagattctttttcccgtccgcagaggtgatcagggcgattttggccagctcttcctgataaccggcaacgcccttcagggccgcggtattcaggtgtaaacgggataattgtttcttctgctcgctgtccgtgaccgcatccgaccacagcatcgctttatcactgtggccggcactcagtaccggggacagggccacaccctgatagttggtcgtaatctgagaaccggttttctctttgatggtttcattaaccagagcacttctggttttcgcttcaatataggcattaacataactgacataaaactgcgtgtcattactgaccgacgtatcctgctcaacccgttttttcacttcctgagccagacggtcagcctgcccctgctgccacaacgccacaaaattctcatccacaatctgtgaaaccgcccccagattgcgttcataaatctgtgccatccggtcagcgacctgctgtgcctgtgtcacctgctgctgttgcgcggtacgctgacccgccagggtctcctgttgctgcaacaacggtttcatcgcttcctgacgctccagaatattgctgttcgccagcgatttactgtcaaacagggcctgcgtctgcatgtactgctcatgcgcctgcgccctgttctgcaacagggcattctgggctttcatcgccgcctgcgcctgttccgccgtcatattgttccccagcgccatactgccctcaccgacagccgtactgtgctgccccgtggccacggccgtgtcccccagtgacacgtttttggcctgtaaagcgcaggaataactgacaaccagcgacaaaagcgttactttaactcccgtcgttttcatgacgtcatgtttcctctttttaacatacccaatgaagcggccgggtaagccgtgctgcaacacggtttacccactccctgctccacccgtttcatcatcccggcacccggggcggtaacccccgtttccggtcaagttcatctgccaccctgaacgccgcttccagctcactgcatccgtattgctccatcagcacccgccgttgctgcttctcctctttttccgtcatccccagcgccagatataagctcggctgtaccacccggaacagcgcctccactttccgcgccagcaccaccccttccgtgtaacagccggagagtttggctgcggacagcagcacctgtttctgctcctcactgagcgtcttaaagcgggcgattgcctccacctctttctgcggcatcgtcagacacacccaccactccgccatattgagcattttctcggcacagtccggatagtcatcgaggttctgggtcgccagccacagccaggcccccagtttccgccacattttcaccactttggtcacatagggggataacagcgggttgaccgtcacgatatgcgcctcatccaccacaaaattaatgtcccgggcccggtactgatcccgctcggcaatattgttgatggagttgataagactcaccatcgtcagcgccatctgggcctcatacccttcccgcgccaggtgccccaaatcaatcagggtcacatccgcctccggccacagctcccccggcagattaaacagctcatgctcaaaactgcccggttcggtaaacatccccagggattccgccatttcggccgctttcgcccggcgctgcggatttaatgcccgcccttcctcttcaccttccccccgggagagggcatacagcgcctcctgcaaatccgccggcagcatctgccggtcggcggcataagacgcccgggcccccgccatcagcgcccggcggatcatcgcccggtcagcccgcttcagctccgcttcttcccgcacatccccgccggtgatcatcatgcgggcggagatttccatttcccccagaatgtcacgctgcccgtcatcatcctcagattcactgtccgtctctggcagttcatccgcattcagtgccagacgctgttcatccatcatcagcagctgatgcgcatccgcaaacagcggcagacgcaccccgctgccgggcttgacactgaccttattgacactcagccccagactggcgtaatagtccgccagtaaaccaaaggagttaccggcctccgcaataaacagacgcggacggcggaccgccatcagctgcgataactgtgcgcataaggtggcggatttaccggccccggtgggaccgaataacagcagatgcgcattctgggtacgatcctgtttattctgcggatcaaaggtcagcaccccgccgccccggttaaagaaactccagccgggatgcccggtgccgctggtgcgcccggtcaccggcagtaatccggccaggtgctgtacccaggtcagccgggtataccagtgttttttatccgtctgcgggtcaaaacacatcggcagggcacgcagatacccgttcagcggcgccacatcatattccggcttcaccggctccagaccggcattcagcagcgtggccgtcagatccacgcgctttttgttcagttcctccaccgagccggcacgcagcagcaatgacagggaggcccggtaaagcttatggcggtgccccagtaaacctctggcggtttccacgtcccggcgggtacgttgcgagtcggtgttttcccccaccgagtttttccccagccgggtaaattcctgctccagcgtatcctgaggctgtgtgacgatggtcatcgacagcatcgtcccttccggaaacaggtccatcagcgcattgatatttttgtcaccgcgcttctgctccccggtcaggtgccccggccccggggctttacgcagtttttcgatattcaccacaccgtgcgccaggttatcaaaccaccacacgccgttttccacatccgaccggggcggggtaaaccacagcgtttccgcaaaatccttcagcaccggcagggtgcccggggcttcctccgccgccggccagtacgccccttcccggtacagcgtctcccggtccacccagtcaggggccggattgaaatgacgcagcagccactgatgcacctgcctcccgtcctggcggacacactgcacgccggcactgcccagactgctgaccagccggtcacacatctgattgagcatcgccaccggcggcatcggatcggtatagctgttccccagccggcggtaaaccaccatccgggtccggcgctgctgtccgcgccagggttgtccggtcacctccgtgtccttaaacagcccttccggacgggcaatcccccgtaaatgacgcgccatttcggtcagccaggcttcggtaaacgcggtgccccgggccgccggcaggatatagtcccgcaatgtggccagtgtgacgctcacgtcgtcctcatcctgacaaaaaaactgcaccacccacgggttatcatcatgctcatccagactgtcctgaagcgcatcctccaccgcatcccggatttcgagcagacggccggcagagcgcccttccgtcggcgccggctcaacggcatacaccgccccgaccgacaccccgtcatcaagcagcaggcattgctcctcatccagaaattccacccagggcaggtaatcaataaaggacggattcgcatggtaaatcttctgctcatccgcccgggtcatttttcccggccgggaaagcggctgacggcctaaaccggcattctctgccggtgtactgcggtgtacggttttgtcagccttgttttcatccgttttttcagcagaaaccgcctgcgctttccggcgtgagcggaataatgaaaatcccatcacaagccctccacacgctcacccggcagggcatactgcacttgatggtaaaacggaaacaccgtactgtatcccggcaccggcagattgccggccgagagatgcgggaacacatacatcaccatgtccgggttcggcagacgcggaaactgctgatggatctcactgctttgtgtccgggtatacgcggtgtccgcctgctgaaggcgcgcggcttcatcattcgtcagggcgcgtcgcagggcgctgcgggcggtctccgtcaccgtccggctgtccgccgcaccgttcggatcagcctgtctgccggaccagatggccatcatgtcgctgtttcccgccggcagcagctcctctttggaggtggcacagccggccagcaacaacaccagtgcgcacagcactctgcttttcatcacacatttcatcattctcatgatatgacgcctcccgcgcccttcaggatcgccccccggcaggtcagccgggcaaactcaccgtgacagctcagttcagatagtgaaaaaggcacacattgccagccggctttatccggcgcctcccctttaaaaacggtgtacagcaggcgatcccagtcactgtcctgcggccacgcctcatcccgcggggcaaaccggtaaacggtaatgtcgttgtcactcagccccacccggtgacggcccacagacagaaccgccccgggcgtctcaccggcggtactctgccacgccagctgtatcgtcgccggtgacatgccggcaatcagctgctgttgctcctcatcaaacacctgatgaccggccaccgtcaggcaaaaatgacttccagtacaaccggcctgtccggcactgaacacaaacaccagcggaaacgtcaccggcgtcacagccagcacccccggcttcgcaaaatacgtcactccagacctccttcctcaccctctgtcagtgaaaaaccgtaattcacccggcgtccctgcgattcataatccaccgggatctgacggctgatatgcaccgcgactttctgccccggcggcacatacaccgcatcaaaggtctgcccgtagcgggatttcacccagtccgccacatccttaaacccgccgccgatggcactgcccagcgccgctttccccgcatccccggagagcgaggaggtgataccgtacccgttgttctgcgcggtatactgactctgcgacatcgcatccccggccgaggccgctgccgtcagggcaaacagggtcggcagataggtgccggcattggttttacgttcaccgctgatacacgggatcccgctctcatctgaaatccagccgagcgacccgccgttattacgggcattctgtccgctgttggcctgactgccgccgtccgtccggtcagccggcttcggcaccgtgcggatcgtgccgtccgtaaaaacaaaggtgatcgaggtgatatccccgcgcacacaggacaatgtccagtcaccggtggccgagccgctgatcaccgccccttccacatccggtaactcaatgccgttcgccgtgaggttgtcttttcccaccaccaccttgaacggatacggatcggtcactttaccgtcaatgggcacccgccccagcaacgccgtcatcgcctggctgcccaccagggtggcattctccggtatcgtgtacgccggttcggtatgggcctcaccgtccactgtaccggagagcgtgcgctgatttttggccacccggtccagttccgctttctgacgggtaatggcgttatcctccagaaaagaggtcggaaacgccggtttagccggttgtccgttcaccatccgccccggttcagccggttgtgcatcctgcggctcagcccacagcaacccgtctttcaccgtcagtccgctgcccccggtatccagccccagtcccagcggaatatcgccttgtccgctgccctgagccggctgaccacctgatgctgtcagcgtttcccccaggctatccagacgccgcatcagtgtctgctgctcctgttgcagggcacgctgctgactctccgcttcctgacggacggaagccaccgcagactggatctgccccgacacattctgctgccggttacgcagctgcgcattctcttccagcaatttctcattctgggcgatcaattccgcctgacggtcacgtaccgttttcatagtgccaatcagcgtcctcagtgtatcggccggggtatccccctcaatcccgagtgacttcagctcccctgggtcaaggtcattgattgactgagacaggttgtcctgtccgctgccggtgaccggcgtgtcgggctggcagcttttgataccaatcagcaccgccaacgccagtgcggacggcaccagaattttgaccagcgtattggatttcactttcatcgggctttccctcccgtcctcctgacaggcggctccgcaggaaacgccttatccggtttgcctttcatcaccagatacactgtggtggtatcctccggtgtgcccttcgcgtccagccactgatgctggaacgtggcgctgacaaactgcccctgcaactgacggggatccagcacgactttctgagcggactgattggtcagtttcaccgccaccacccggtactccgccgcctgccagccggccagcggccgcgcgatcagtggttcagacgggtagagtgctgtcagtgtttttggtaaggtcagtggcaaaggttgtacgccggacaccggctccactgttcttaacggtgcatacagactctgggcggcataacgggtcagtaagaccggtaacggcgccggataacgggttttcgctttgcggtccacgctttccggtacggcatcggctgctgcccccgcagcctgcccgctgcgtctgacgctctgactgtcacgctgcgtactgacttcaccgctgtacaccacccgcaccggctccagcttccctttaccggcagtggccgtcacatccagcaacaggatttccccgctttccacatcctgtaactgaaggcgggtctgcgggaaggcgctttccgcccgcaggtacaccgcccctccggtactctggatccgcagtttctcattcagagacggtggaaaaccgacacgcacatttttttccacaaacacaatgcgctcttcccccacatgcagagaaaccggtaacggaatacgctcccagcggaccagctctaccgcctgcaccggcagcggcagagcggccacagaaaacaccgccgaaatccccagagcacaggccgtcagatgacgttttatgctcattgactgacctccttattctgctccgccgcttccagacgctgaggcagcccgtcatagcagtccagggccagaccaaacggattactttccggatcgccctcccagcgcaccactttcaccggataacgtaccgtcgctcgcttgaccggctccgcgctaaaatattcatccgctaccaaatccaggcgcacgatccagttatcccggtcaatcacccggactttatcctcactgaacccgcgtcccgggatctcatacaccacccgggaacgccctttcagctccccgagcgtagtacggtaagcggcctctttctcaaaatacgcccggcaggacggcgtcagataggcactgagctgtgcaatctttcgcggataatccacctcgccgtctttcggccaggcattcagttgctgaaaaatataaaagctgaaagcgtacaccgtcggcagcggcacttcccaccatgcccgggtactgccggagcgcaaatccggcggattatggatcgtcagtttagccggcgcccgcatccagccggcaaaggccacaaacaggcagagcaccagcaccccgcagatcatccgcagtgtcagaatgtgctggtcccggttttgcagggcatgacgaaatttactcatggcggcctccggcgatataccggcacagtgacagcgcctgcgtccggcgtaaaaaccagccctgagatacggtgatgagggatttttcagtcagccgtccggtcagcggcaatgtgcgggcaaacccggtttgcagtttccaggacaatcggcggtagagataattttccggttttccgcgtttgatacgggtcagaaaagtgccgccaaaaaacaccaccaacagcggcattatcaacgcgccggtcggcaggatcacccacccggccagcggtaacagcgggatactgataacgctcccgcccacacaaccgacaccggcggcggcaaacatttcatgggtggtaaatccgcgaaagacggtgggctctgcatttaagcgatccggcataaaatcgatggtctgcatcgttgcctccgcttaaaaaataatagtggcggattttccggccagccagacgaccgccacaatcaggacgacaccgactacaataattgtaccgaatttaccccagccagccttttggtcgcgcacttcattgaacgtggtgaccgcggcaatggccaccacgataaaagccgtcgcagccacaaccagcccgccaatcacaatgccgtcattaagatagcctttaatggtgtccatcagtccgccgccgccaccggaagaagggggttccaccgaaggcagtgcggcatacgccggcatcagactgaataaagtgaataacgtcaccactgacgcaccaatacgacggacaccacgtccccaaaatgatttcatatccataaaatgacctttcattctgtaaaataaattaaacagcacactcaactggcaaacatccagatgcagaccaccagtaatatcactgcccggacagcaaactgccccacccttgcagtacgaacattttcatttgcccagccccggtaaacatcaaccagtccccaggctgcccataaaaacagcaccgccagtaatgccccgatacacaacagattcagaacagccggagacatccccgagccggcagcagcctcaaatgccgcctgctgtgacggattcatcgctgctcccggcggtaatccccgcgcagcggctccgccacattaaccggcaccgtgggctgggcccgggaaggctccagatagcggacaatcccctgccggataatctccacctctctggaggcgcgggaataatcaaaataaaaacgggcgtgattgtcctgatttgcctgaatacgggcgcgctccaggctggcctggatgtgatcgagctgctttaacgtcagcgccagttcatctttttcagcggcctgagcaggcaataccccaaatgcactgacaaccaacgcaaacagggaaataagcggagaaaataatcgcataacgactccttaaagacggttaacgtggagtcagggtaaaaaaggcggacagaaaaaacagcaaacaattagttttccaaattttttaattttatattgcttgctttttgcgaaaatagctgaaatgaataaataaaagtgagcctatgagtcagaccatcacccgaaaaactgggcattttgcctggtgtgcactggttgccctgcatctggcccgcagggaggggctggtgcagtccgacatgcagaaaaacctgtttttaatacgctggctggcaaccgccaaaaagcaacgccgttttgaccgtgacgttacgccggatattgactggctgcttcaacagggacgtacactggggagccgggccaaactgccacaaaaactggattatctgtaccgctcctgtacaggcgcattacacgagcagagcgatctgttccggctcacttatgcgcttgaatcggccaaggaggcaggctttgcctatcagttattgagtgataaatcgtggcacagacgacatgcggtgagcccggatacgctcagcaacaccatctgtttatccaaaaatgcactggagcaggcttttgatactgacggtcatcagaccgcacacctacctgtaaaaatcggaggtgatatcgccgcactagctgaactgctgacacaatgtggctggcaactcatcacgacagacaacccgccactttatttactgctcacactcatcaatccatcaatcagcgcaggataaccccatcacaccactgacgcgcggcctagccgcttgtctgctgacagagacacacaaaaacaagtgttgtgtgtctctgcccagcgcctataaatattttttaaatgacgcggtagccactgccaccgcaagcccgaacaacagagccgccggtaacaacaccagattagggtaaatggcagacggccaggacagataaatcatgcacggaacaaaaaaggccggcttaacaaaacgcttggcgtggtgatacacaaaactggattcatacccggcaccataacgccgcaaatcacgccggttaaagccttccaccatgcccaccaacagcaccataacaaacaggggcatcgacagcaccagaatagtcacccggataaaaaaggtcagcgtcacataaaccgtcgccagcagatagtctctcagctcggacacaaaccaaatccgccagtcatccagttcacgggcaactgcattcccgctgacaggatacacgttctgccagctctccatcagcccggactccacaaacagccaccggtatgcctgttcaacggtatgagccagccactgcgccggactggacatcagcagactacgggtaaacccttctgacagatacccgctctcggttaacatcacctgccggctgtgctccgccccttcgtccgcccagaaaaacgcaatcccgacccactcaatcaacagactgcatacccaggaggccagtaataccccgatgatggcccacggccagtgccacaacaatttagccggcaaaccggggtcttttgccgggtgacgcggggtttcctgacgtacctcagcagttgccatcgttgcccccttcggtatccggtgccatctcagccacattcataccgccgctgtcatgccgcgcatccgaaaatgatgacgcagtccaccaagtttcgccggtacggtaatttttctccatatactgtgcgattttttgtaaatccggtggcatcagggcatcagcctctgccgccggcaggggcatcctgattttccataacttcccgccttccagcagcgcaaacgcctgtcctttcggtaactgaataatatctgccggtaacagcagcggtttagccaccatactgaccctgtcctgggtattggaggtaaaatcactcccctgcctcggattggaaatatcggtgatcccggataccagggttttggtgtaaatatccacttccggtaactgttccgtcagtaatttcgcggtcatcagttcacggacacgcaacatcaccagcgtattaaagttaccggtgacctgcgccgatttcgccgcattccccagccgggcttcaatatcagaccaggtctgtgtgtaggccgtcacttcaatccccgcgccgccgctcttgttcagtaacggaataaattcatcccccatcagttcattaaattcatcgcaatgcaggctgatcggtaattttccggcgtgctcatcctccggcagtccatcctgagtcccgaatttataaatatgcccggctaccgagaccaaatccgcaaacatggaattccccaccgctgccgccacttccgcatccgataacgcatccagcccgacatatacaatcccttttttccgaatcacctgctgccagtcaaaaatcggacggggatcctgcatattggtgtaatccggcgacaacagggcggcagtttttccggtagtcagtttttccagtaacggcagcagagaagccactattttatcaaaataggtccggtcataacggatcgcactgcgcagcccgtccaaaatcggatcatagatttttttccctttctcactacttaacgccagctccgttgcccagatagccacagctttcggatcactttgcagatgacggggcacatcctcgaccgtcagcgcgttctgcgcattctcgatttgggcaaacaaatcaggtagttgtgctttaatcacctgcatcgaatatgtctgatagagttccccgatattggtgacataacgtaaaattttggcataatccggacgctcccccagagcaaccagtgcccgggcaatgatattaacaaaccgccaggcaaactcccggaacgccgcgctgttcccttccccggataactggccggcaacccgccccgcgacttccgatactcggccaaaacgcccgatggcgttataacgggcactgatatcaggccagcccaagtgaaaaacataaaactcctcactgcgccccgcacgatgcgcttccgcccacatccggcgcaataaatccgcatcccctttcggatcaaaaacaatcgtgatattcccccggcggatatcctgagtgatcagcacttccgccagacgggttttgccgacacgggtggtccccagtaccagcatatgaccaacccgttcacgcaaatccatggtcacattcacctcatccggctccacaccgtgtaacaccggattcccccccaccggcgtcagcgggcggaccggattcagccaactgtctttttgcaaaagccggcaaaccgccggaaaacgggattcaaaacggagttcaaactgccgggccagccggtaatgtgccggcggctgaacataccgctccacttccggacgctgggtttccagcaggcgttgcgtgtgtttttgctgccactgaaacccttttcccagaaacagacgctgccggctgaccggcacctgtgccgacgtcacctgatagcggggcagacgccggagattccggcggtaacgtaatacccggaatccctgatgtgcccgcaatgcggaaaaaccggcaaacgcaccggcggtgacataactcacggacggagacaatgccactgcccagggcgctaccgcacacacaaacgccgccccgccggacaccagagcactgttcaattccacggccggtcgcagccaggcctctatcacataacgatcactcattctctcaaactcttttttggtgttaccccggaaaacagtgtttaaaaattcaccggtgtttccagtggaaacagtgttcaaaaatcatccagcgtttccactggaaacactgtttgaaaattcaccgacacgtccggaaaacaatgtgctcactgcactcaaccccagggaggatctgacggattttctttttccggtacacgcgattctttcccgtgacagtgacgatgacggcgggcaggacggttttttttccccaggagtctcatcacaacaaagaacacgcaccacatcagcacggccaaccagaatgccggggagtcaaccccatctgaaggccatatcggcggtaacattacttcacctgctgggtcaacccggtttccgtgatcagaactgggtaatgtgataactgaagacggtgagctaaatcggtgccagaagctggggagagcagtcctccctgagccagcgcctgaagcgcctgtaacccggtttccgatttcacattcaccaccatcccggccgcattcattgcattcagctgggctgcgtgctgtgtgagccatgcccgggataacggatcatcccccaccagatacagtgccccaatccccggtaaatgcaggacgcggtcatccacctcccccggcgtcatttccggtgtctcaaccggcaacaccattgacggggccatcacggacggcagagggcgggacgccggctttgctgtccattcattcggggcattatttatcgcgtcataaaaaggtgctgccggttgcccgccataatccgccaccaccgttaatgccgcctgactgccgccggctgcgcaaaacagcagcatccccaagacgggcaggggataaaaggctcgcgttgtcttttcttcaggattatttcgcatcggttttgttctccggttctatccacacaaacgatacagcccgatctgtactgactgccggtaaatgagcgggaacgggttgtgtaccgcccgtcagtgtcgccagctgacgccggacactatttttatagcgtactgcgggctgaccgcccgccggatggtgataacagccggcggcacggatccaactacccggtgacgcctcataacagcggcgcaggatgcgggcggccacatgcaaattggtataaggatcaaaggcctcccaggcggaacggaagtgatgcccgttccagccccagttcacctgtgcaatccccacatcaatacgtctgggggatgtcgtctgtaaaaacgactgtaaagcctgccaggcggcctgccgtgtcggataacggtatcctttaccagccacattcagcgtccacggccagggatggatttcaccggcctgcgggtgatgtgccggtaatgtccaggatgactccgtcagtgccagggaatacagggcttctgctggtacattctcctgccgggccacctcacggtagcccggcggcacctcccgagccggtaacggcacggaaaacagcagcaggacaagagtgagcagggaatttttacgcatcacgcctccggattaaggtgtgagcggacgccaccgcccatccggtaactgttgcatcaccaccggtgtggtggtcagtccgtactgaagcgagagaccgccatcatgatttaacgtaatttcccgctttctgacgcgctctgccgggatatttttttgtctggcccaagccctcaggcggttatcatccccctttgtccccagcacataaatatcaaacggctgtttgccggccagcagagtagccagacgggcatcacacgcgctacaattttccgcctgcacaaacagtgcctgccggcgctgcgctgttccctgttccatcctgccgaatgttcccagactgaccggtaatacctgaccatagagccgcttccaggcagcatctacttcccgctgaaacgccagctctttttctgccctggcaaattcctgctgtacccacttttcagccagccggcggcgctcttcgtctgaccgggcctcaatacccaatgtcgtcaggggatccagtccgggagactgaataccgcgccgccctttcatcagcgcctcaaaacgggcatactcctccgcactcagtccccattcctgcgcctcatactgcaatgactgtgtctgactctcagccgatttccccgcctcaatctgaaccggtcgggttgccccggaaacagactgtgcagctgtcagcggtgcggacatcagacacccacccagtaaaaccacgcatcttatgtttttcatcacggcattccttttatggcaggcgcaacgtcactgtgcgcccctgataacgtaatgtcacacgatcagtctgaatgtcggtcatttcccagccctgataacgtccgcctaccggcagtaactgtacctgccccagctgacgaatatccgcaggagccagtgcggcaagaagacgaccgccccgctgttcaatcgcggttaactgaaacggcacggtccgggatggacggacagaagccccgagacgggaagtttccggcgtggcgggttttgccctgacaaccgggggattgaccgttttttgttccggctgacgctgttcctgcaactgatgtaacgccagtgcccactgtgcctggcgggtttccagttgtgccagccgtttttccagcccgtcagacagtacggcgatctgttcatccggtttgccggccaccgccagctgtgctgtcaccgttctgagggtgtcgcgctgtgatgccacatcctgttttagcgtcgtcagcccctgacggagcacgtccagttgcgcattcatccggtcatccgtgacagagtcagccatcttcatctcaatcgcctgtaatcgttgtccgagttgtgacagagcctctgagtgtgaactgataacattactgtggataaacagcgggataccggccaccagagcacaggcgaccacgcccgtcacaatcaccccccggtaaatttttttatgtaatggggttacggacaattcttcagaatgagtcatttcagccaccctccgcgatgaaccttattcacatcggtatgaccagtggaagtgttaagcaccggtggcaccggtaatggcgtactgcccgcagaaagtggggtgaccacagagacggatgaagcgccgctcattcctgcatccggcgcagatggcgtgtattccggacgaagtcggtaacacacttcccgttgcacatcatccacccacaactgccaggccggaccgacaaggatctgtaacgccacattcaggcggatcgatcccatctgataatgaacagcgggtaacggcagacgataaaggtggttcgcctgtccatcggacgtgcacagacgatatccggaatcacgcagggcataatgtagcgcatccccgactgtcggggagacggaagcaggaatacgcagatgaacaatttgttccagcgggtaacgctgtgcctgtgaaggcgaaatatcaaccagccggtaacggtcataacgcaccacttccggggctgacggataaatatctgggagcagcggctgagcataaccgacgttgagcggaatcgcgatgtctgccgccgcttccgtaggctgggctggcttgtctgcacagccccccaacaacagtgaggtcagggcaagacatatcgggagagttttcatacgcattttctgtcctgagttaacaaaataaagtcacaggcacactgtgcgcagaaaagcaagcgctctcaataggaaattagttttccgaaaaaaaagaaaacggcgggtgtaaaataccgcctctaaaagaggtggttttaaattgggccccctataagggggctatattctttattaatcccccaacaattccatttgttggtcgagctcttgatcaactttatcctgatgccttacataacgcctaatgatgacttcattaacccccaccgtatcagcaaaatatcccctagcccaaaaatgattaccccaaagtttcttacgtatatgtggaaatcgattatataaccttatcgtactacgtcctttcaggactcccattagtgttgatattgatagtttaggtgggatcattacaactaaataagcatggtctggctgaacatttagcaccaatacttcacagtctttcataatgcagagaatataaattattctataaagctcttttcctactttatctttcaatatattataacgatatttaggagtccaaactagatgatatttgcaacgtcaatacacatgtgatgaacttctgtataaacccatgttatttcctctttacttgtggtgagtaagaggtagttttttaacatgggtttccttcaggctatagcctcacagggtcaatcatcacctgcttaggtggtggtttaaggctgacaataaaaacccgctttttggcacaggcggattttactataccctaaaagttaatacttccctgaaccccgatctctctcggattacctagctgtgctttattaccaaatgcatacgttcgatataaagcatcaccaatatttttcgcatagatactaagttcatattgctttgtagggtgccatgatattgatgcatcaacaacagtataatgcccttgttctaaattattttgctcattaaagtaaaatggtccattaaatctgactgcaatccgagaagaccacttttgctccttgccatataagccctcccatgaaattaatgaactataactaggagtataagcaggtcttttatttttatgttctccactggtaaactctgattgattgaacatgccacccagtgaaatactatgattaggggtaagctttgatttccaaagatattctatccctcgacttcttgaatctcccatattagataatgcctgataaccaataacacctacatatccttgaacatctttactatctatttgatataaagtaatttcggccatatggttatcattaacactgtgccatttccaacctaattccatttccgtggcaatttccgatttataagaagtcagagctagtttatcaaccccttctttgttaaaaccaccaggtttaaaaccgcggccaactccaaaccatatacgattctgctcatttggaagccaggcgatacttgctcgtggaataaaggcattaaaaactgcattattattataattagactcaccttttcctttttctaaaataatcattcgagtttttgctttttcgtgagaaaaacgagcccctgcacctaactcccaattgtcatttatcctgtatgcaccatcaaaatatccagagtaattataaatatcattatcagatttttttcctcccattccgactttccctacagataaattatcatgtctataacccatcttttgaaatgatacccctataattccacttagatcccccccctcataattagctcttgcttctgaatacaaaatatcctgagaatcatcttgtaacgttccgtccataaacaatctatctatatccatattttgataagaaagtatcgttttaaacttccattcatcattaaaatcataacctgtattccaggaaatattttttaatttacgtttaagattaggtgtttcatataaccattcagtatcaatttttgaacgtgaaagaggtgaaaaaggaacaaaatattcctcatgagaatggtaattttctccacctacttttaaattagactcaaataatgtatcaggggaaatataattagcagacaaccatccagcttttatatctctgctatcaacattttttttatcccatgctggattgttcaaagaaccattatttctatcgagactaacattcccctgaaaagcccagccgttttccatgtagccagtgcttcctcctgtattgattctttccccttgaccaaaatattgcccccctaaccatgcttcagcgtgactactgggttttttggtaataacactgataatccctcccaatgtgccacgcccataaataactccttgtgggcctttaagtagctcaacttgctcaaccccttgaagagattgagcatacgattgagaaagctggggagcaccatcaacaaacagtcccaaacttggagaaaagaaatcggccgaagattggccccgaagagtcatattgttataaatacgcgaacttcggtttgcagataacaactcaggaaaaactgcgctcaaatcatcagtttgattaactaaagatttttttaactgttcatcagtttgaacattcacattaccaattacatcaaaactactttgaatgcgcttagttgcagtaacagttattgtattatcatgctgttctgtggcagctacagagcttactgttaccattgtagccgctacaaaagatatagatttaaataaagttcctttattttccatataaaccccaaaatgtgcaatggcactttacgccgaaatgttaatgcgaattaatatcatttgcattgttattattatttgaggttgatcacattttgagcatgaaaattatatatacttatgaaagtgtgctgagtaacagaaaacatgaatattaaggtgggttaatagagtgcaaaccaatgacaaaaaacaaaaggatcattgctgctataaatcaatctgttatgagttatcagccaacagaaggatcattatggctataggtggggtttatatcacccaaacccttatatcaatgattatcatgcaatctgtaccaaccttactaagaagtgaaggattttctctctctttaattggattgacttcactttttatgcttccttggacacttaaatttttatggtctccatttattgaacgcctgagattaccttttggaaaaaaatttcgccgttcacgtaacttgattcttattggtcaatcattggttgctcttttagtttttttacttattctaataaaccctaacgataatataagcaaactgaataatctttggatttttggaatatttatcctatgtgcattcttaacatcgactattgacattgcatgtgatggcatggcggtagaacagattaaggcaagtaatagagggtggggaaatattgcccaagttggcggaggagaaataggagcattattaggcactagtggttttttattaatttccagttattttagcttaaatactgcatttgctatatcagctctaaccatcatattacttacaattccaacactctactttaaagaatcagatagactaaccacatctgaaacttaccatatacccaaattatcatatgcatttaatcgaaaagaggtaagaattggtattttattagtagttttattagaaggaggtaacagaatcacagatatgattaccggacctctattaatagatataaatattacattaaataatattgcactattaataggaagcttcaatttttgtgcaagcctatttggaacacttttaggtggtatattaataaaagtatttggcatatggaaatcaattttcattacctatggtttacaaggtttaatttttactttcatatccatggctataggaataaaatatatcccacatgaaatactttttttacttatagggttcaaatatattcttttttctgcaggactagtttctttttacactggtttaatgagcttatcttcattgaaacaagctggtattgatttcactattttccaatgtacaaatgcttttacagcaatcattgctactctattaggcacttggacagcggagaactggtcttatcattttgtttttgcaatatcatctatttatacttttatcgcagtactaatttccattaaattaataaaaaaacgccttaaactaaatatttcatcaaacaattttgagcaatatgtataattagtaggaaattgaataaggtaattacagaatggataactatgaagattattatactcagtctgctgaaatgtatgatattttaagcgaacctcattgggaaactcgtaaagatacatttataaaatccttgaagtttatgggagtaaaaacaggcaactggttaaatataggttccggcactggccaagaattaagtataattgcgcaaatgtttccagacatacatatttttgcaattgaaccgtctgcatctatgcgtattggcctaatgacaagaattatgatgttacctgaaatacaacaccaagtaactgtgattgctgatacatttcaaaataccattctaccaaaatcattttctgccgctattatatgtggctgtataggatattttaatcagaatgatagaaaaatattatggaataagcttgcaaatgggctagaaaaaaaaggtgctattttggtagatacaatgccgtttaatacgccttgtaacatttctaagatactattaaatagtaaaaaaatagggaaccatatctatgaaatttatttaagtggcaaacctatagatcaagaggctattcgttggaatatgaattttaaaatcatagaagacgataaagtcatacgaaattttaatatagaaagagattggtatacttttggaattgaacaagtaattaaggaggcatcaagagaaggattggtccatgaaaacattagctcaagtactgtaccaatggcaatcctccgccataaataactcataattaaggtatagaaatgaaaatattaagtgatattaataacataaaagaattatgttccaagcaaataaacattgacaaaaataaattttcagataaggacaatctgataaaattaggtcttgattcaattggatttatgcaatgtttatatattttccaaaaaaatggttatgctataacattaaaagatttgtatttaaatccaacaataaaaggatggtataaaatattaaaaaaatcagatataaataaaaaagaaagaaaagataatatatatacacataaaacaataaaaaatgctggtgagttttcacttacacctatacaacatgcctattttgtcggccgtttgaataaacaaactcttggtggtgttgcttgccaaatttatcaagaatttgatggcacccctaaatttactccggaaagtctagagaaagcattagtattattatcaaaacgtcatcccatgttgaatatagtatttcaccaacagggtacacaattttggtctcctaacccaaatagaaaatatgttacatatcatgattttagtaaattaccaaaagatgagtatgagaaaaaacttttacaattacgggaaaaattaagccatcaggtactaaatgttgaaagcggtcagttaattgattttcacatgatatcgctacctaacaacagatatcgtttatgtactaatattgatatgttgattgcagatggtacaagttattcattactctttactgaactttgtttattattgagcggagaaatactgcctcagttagatgagcactatgacttttaccattatttacaagataaaaaacagtatgaaaacaaagaatcagcatatcaatattggaaaaataaaatcccaaacctaccagactctcctcttctgccattatatatggatccagaaaaaataaataaaataaaaattaaacgccttagctggacatttagctcaaaagaatggaaaaactttagtaatttggctaaagaaaataatattacaccttccattgcattagcaacctgtttctcatctgtacttgcaagatggactggccaaaatagcttattactcaactttacattatttgatagaaagccattagcccctgcagttaataatattatagctgattttactaatgtcattcttttagaaatgaaaacagacaatcgaccattaatttcattatctaaagacaatcaaaatacatttattgaagcttggcaacattctgattattctggtattgatatcattagagaccttcgtaaaaatggcacccatccttatgggtgtcctgttgtctttactagccatattaatcaaccacttattgataaaaatatagaatctgtattaggttctataggatggggaatatcacaaaccccacaagtttggcttgatcacatggcaattaacaaaagtggaaatattgttttacagtgggattataacaatgacttgttccggaatgatgttataacaacaatatttgatgtttatatttctcgtatacgccaacttgccaacgatcctaatgcctggattgaaacccaacctgatttaattcctaaaaaacaattaaaaaatagaatatcagttatcaaaaaagataattcactattaccacatacactgcataagtctattttccataattattcaaattcatcaaaaattgctgtcattgatatcgactctcaggaatggagctacaaaaaattattatctaaagcaacaatactcagtgatcaaataatacaacaaggttataaaccagaagacagaattggtgtatgtatgccaaaaggagtagggcaaatcattagcgttctggctattttattaatggggggaacttatgttccgattgatgtactacaaccagaagaacgtataaaccgcattgctaaaaatgctcagctttcattactcatcgtatctgatagcgatccatcctattcaatctatgctacattttgtaacaggattgtttggcaaaaagttcaaccctccgagaataaaccactacacaatatagatatatctcctcatcaagcagcttatgttatttatacttcaggttctactggagagcctaaaggtgttgttgtatcccatgccagcgcaatgaatacctgccttgatctcaatcggcgatataacatttcagacaaagatcgggtacttgccatatcagcactacattttgatctgtctgtttatgatattttcggtgttttaaatgccggagggactcttgtattagttaaagaagatgagcgccgtaatcctgatgcatggttacgacttattaaccaacataaaataacactttggaacagcgtacctgcactgtttgatatgttactaacctatgcagaaggaatagggtcatccattccacaatcgctgctattaatctatctctctggagattggattgggcttgatctcccgacacgttactataatttctgccctgatggacaaatagtcgccatgggaggtgccacagaagccgctatttggtctaactattttaatgtcacaacattagacccatcctggagctcgataccttatggatatcctttatccaaccaacgttatcgtattgttaatgctagaggagaagattgccctgattgggtatcaggagaactttggattggtggtgcaggcgttgcgttaggctacctaaacgatcccgaaaaaacagcacaacagtttgtaaaacaaaatggtgaaaattggtataaaacaggtgatatgggaagatatctccctggcggtatacttgaatttttaggaagacgtgaccgccaagttaagattggcggataccgtatagaaccaggggaaattgatgctgcattcaataagcttcagggtgtgcaaaatgcgattacactatgccttggtaatggtaataaagaaaaagcattacactcttttgtgatactaaattcgggtaattaccaggatattatcagttcaaatagcaccttttctcccctctactatctgcgctcaaccccaataaatgtacaacaacaatcccaagaaacggcaatcatagctggatttttatatgattatcttactgaacaaaatattgatttcgacaacctcttgtcagaaaaaaaatcagcagatgaccatagcattatcgctagctatcagtcattaatggctaattggctaaatttaatagcacaatatccacaaactacactcaattcccccccaactaatagtacccagcgaacgctaatagaaaatttgcagcgccacaaaaacaatttaacagacatactcaaaggtaaaaaatcagctctaacactatttgatgatccctattggtcaccagaacaagtcactatgcgtattgatggaatgcactactccttagaaaatttactacaacaaataagagaacttcatcattcactaaaaaggccaataaaaatcattcaattaggtgctagaagcggtatttcagcaaattatattctgcaacgattacccactaatatggttaccctactgctaactgatgagtctctttcaatggtaacgcaagctaaccaaaatttatcagattatcaaaatagttatgctgagcctcttacagaagtatttcttcataaaaatcgatatagtgcagatatcatttggatgaacaattatcttcatcgattagacagcccacaaaaagagatacaaaaattcgtttcactctgtgctccgagtggaatgatttttatacaagaagtgttacatgcccctgcacaatcactgataagcatctctttattacaacaaaatggtagtgatcctgctgatgaattattaacagcaaaaaaatgcaaagatatctttagcgcttctactgcgacttataaaagtgaaggagttaacggcgaaatattgacacagttataccaagcaccagaaaaaatttatttaccagataaaaataagctagagcatgatttgcgccaatttttaccagactatatgatcccaaaacatatttattttctaactgagttccccttaaccgcaaatggcaaaatagataaccaatcattaaaattgtattgtcaggaataccaagaagaatacctaaatcaacaacctatcaatggtaaagaacagatcatcataacaatatggcaaaagctccttggcaccaacaagatacaccgtcacagtcatttctttcgtgaagggggagatagcctagttgctattcgattgatctctgatttaaaccatattggctaccaagttgaactggagcatatctttgcttatccgatcctttctgattttgcacaaaatataaagcagagcgaagttttcgaaaaacagccagcaatttcacataacgaggcgtatagatacaatccatttccactcactgatattcagcaagcttacttagttggacggcaaaataattttacacttgggggtgttggtacacatttttttgtccattttatagcggaaaatttagatgtacctaaattagaacgtacaattaatcagttgatttctcgtcatgatatgttacgtggtgtcattattaatggacaacaacaagtacttaaaaaagttccttattattccgttaaaacgcattatatccctacagaaaaaagtgactcttttctagtattacgagctcaacttgctaacattgtttatgatccagaaatttggcctttatttactattcaagttatcaaaaccaaagaacaaccagatcatatttttattagccttgataacttattccttgatggaatgagtatgcagatatttttcagtgagctaaaaacactgtatatggagccaaatcaccaatttatccctctagatattacttttcgagattatattgattgtgatgcctatccgattaacacacaaaatgattgggaatattggttaacgcgtttaccacaattaccaccagccccacaattgccactaataaaagatccagcacagattgtgcaacctcgcttctcgcgtttacaaacatcattatctacttctgtttggcaagcactacaacaagttgctcagcaaaataatgttacgccagcagcacttttgattgctgcttattgcgccacattatccgcatggagtaaaagccctgagttaacaattaatttgacattatttaatcggcatcctgtacatcctcaaataaatgaagtacttggtgattttacctcattacaattactcgattggtatacctgtgatctttggtcaaacagtatctcaatgatgcaaaaacgtttacataaagatatgcaacatcgtagtgtttcagccattaaagtaatgcgtgaaatggcaattcaacgacagatgtctcatatagagatacctgtcgtttttacctgtgcattgggctataaacatgatgaaggttttctttctcatcattcatggctaaaacctgtttggggaatatcacaaacaccacaaacatggctagatcatcaagtatatgagtcagacggtgaattatatttaaactgggattttgtcgaacaattatttgactacacaaccattttttccatgttccagcaatatgaacatatactcactaaactggctactgaaccacaatcttggcaattgccactaaataaacttataccaagatgcaataatctcgtcatcaccccagttttcaatgccaaaaataatcaaaacacacattataaacaatctactgatacacaaaaaacaggtcagacaatacaaaaactacaacaacttgttaagcaagttattggaataacgttagcacctgaaacaaattttttcgaagcaggtgccagctctttacaattggttcaacttcatgcagcactacaaaaaaatggctatagccatattacaattactgatctgttcgctagtccaaatctaagtacattagcgcaattgctttggcaaaacacttcaccaacatgtgagcaatattccgaccgagacaaacacaaaaacaagagaaagaaacggttacaactacgaactcatagtagataaaggatattaatcatgctgaattttgaaactttctatggtaatagtgaacctatagctgttattggtctttctggtcgcttccctgatgcacaaaatattgatcaattttggcataacataattaataaacacgatagctctcgtcttttttctgaagaagaactaaaagccgcaggtgtcgctgaacaaacttatcattcacctgattttgttaatcgtggcgcgccgttagatgaagcggaatattttgacgctactctatttaattattcacgctcagaagctgaacttatcgatccccagcaaagaatttttttacaaggtgcttggcatgctttagagcatgctggatatgccccttgcaatataaccatcaaaacaggcgtttttgcttcagcaagaatgagcagctatcctgcccagcaagatttagcattgcacaatattggccatgtccgtggcatgcaaaaattattagggaatgataaagactatctcgcaacacgtattgcatataaattaaatttaactggtccagcattaactatacaaaccgcttgttctagctccttagttgccgtacatatggcttgtgaaagtttacgctctggtgaatgcagtatggctattgctggtggaattggtatcacatttccacaaaccggtggttatctatatcagaaaggcatgatcttctcaccagatggtatttgtcgtccttttgatgcagaggcaaacggtacttttgctggtaatggatttggtattgtagtgttacgtcgtcttgaagatgccttagtggatggaaacacaattattgctgtattacgtggtagtgccattaataatgatggtcatcaaaaagcgggattcacagctccctccgtagcaggccaagtttcagttattagagaagcaatacaactggccgatattaaaaatgaagatattgaacttattgaagcacacgcaacagctacaccattaggtgatccaattgagtttagtgcattatgtcaggttttcgctgatcgctctcttactgcttctaaatgcgctattggctcagttaaaggcaatatcggacatctggatacagcagcaggtatcactggcctaattaaaacgatattagcggtaaataaagcacttattcctccatctatgcattttaatcacccaaatcctcaattacaaatagaaaaaagcccgttctacattcctaaaaaccctaaagcttggtctagcagaatacgaactgctggtgtttcttcatttggtattggtggaacaaactgtcatatcattgtgcaatcattgcctgactcattagtatcaatcaaacctgaacaagaggtagacaataattttgaatactcattattgcttagtgccgccacaaaagagagtctaaaaaaacttgctggtgattatgcaccattaataaaaattaccccagcaaacattctggctcataatgcattacagcaaagacaactcaacttaccatggcgcttatctatccccttaacaagtgagagtgatatttcactgttagctttctctcaaggaagtgctgattctttaatacaatatggtcatacatcaacaaataagaaaatagcgtggctattttctggtatgggatcacaatatcctgctatgggtaaagtgatgtaccaacattcaacaacatttgccgaaacaatcgatcgttgtgagcaagcatgcctgcaacacttaacatttccgttaaaagaagtcatgtttggcctacatagcgataaacttgttaatgccagttatattcaagcggctattgtcgcctatgaaatcgcaatggcagcacattggcgagcaatcggtattttacctgaaataattgtaggtcattcttgcggagaatatgccgcagccgttatcgctggtttctatacaatcgaacaaatgatgccacttgctgtatatagtggacaattaatggaaagtcatgttaatggtgaaatgattgctgtatttgcagaatatcaagatattcaaatcattgctaaacaatgtcatgttgaattagctgcaattaatggccataacaacttatcattcgcggggcaacccgatgatatgcaaaagtttactcaaatattgaaagcaaagaatattcgatttagagaaatgaataacgtgtgtgctgctcatacctcttatattgataatattcttgatcaattgatggaatttactgagtcattatcagcctcacaaggaaaaatagccttagtctcaggctatacagggcaattaatttctcaaaaagaacttcaacatccatcatattgggctcagcaactacgcaatacagttatgtatcaagatgcaatacaaacgttagtcaatcatggtgtcacccatgctatggaattaggaccaacttctgtattaagtgatcttggtgaacgtgaaggcattactgagattagttggataccaactgccagaatgggagttgatgaaattcagatgaaacaacaggctgcaacaaccctatttattgcaggctatgatttaccatggcagtcactgtttaaaactcaaggaagttatataccattacctctctatccctttgaaaaacaatattattggtatgaaaaaaaggatagtgaaaaatatcaaccacaaaaaagcgcatttgatttacctattagccaaggtcgtgaaacggcattaaaagcgcttacaacactcgatcttcctcgtttaaactcatttaattcaacacttaccactttacataattattacgtcgataaaatgatatgctcgtgtttaggccatgagttgaatacccccatgtctgtaatcgatattatgcgagcaggacgcattttaccccgctattatcaattattagtacgtttattagaggcctgtgttgaggatggatattatatttaccaacagataaatcagcacaactactataaaaaaataaaatctatttctagtgataaattaccattattattccatcaattacaattagatagcgaaggtcttcaatctattcctgacaccgtcaagcgagcaggagagcaactctacgatatgatgacaggcgtgattgaacctgtttcagtgatctttcctgaaggtgcatctcaaggtgttgaagttctctatcaagattttagttttggtcgttattttaaccaaattgctgccgcggtacttaaaggattactttctcactaccagcccactgtggctaagcctttgcgaattattgaagtcggtggtggcacgggaggaaccacctcttggctgctacctattttatcaaccatacaacatgttgaatacgaatttaccgatatttcacctatcttcacccgacgtgccgcacaaaaatttagtcaatattcatttgttaactatcgagagttcaatttacaacaatcccctgaaatacaaggttttcaatctgattattatgacattattattgctgctaatgttattcatgccactcaacatattggagatacattaactgctcttcgtactttactgcgttccaatggtcatttgcttatgcgcgaaataaccaaacaagctcgcttatttgattttgtttttggcccactggtgttacccctccatgatgaaaagatccgtaaaggaaaactatttttatcaccagaattatggcatcaacagtgtcgcttagcaggatttcaacatattcgctggttacctgatgcattaccagaaaccaaagatatgtgtgaacatattattctcgccagtgtttcgacagaaaacgatcactttgatcaagagttacctagtgacaccaagatacaacaaagttcacactaccaatggcaattaacaccttgtgtggaacaagatcttatcaagccaacattaatatttaaccatcaacaaacattgccttctgaaatcacagctattttatccgctattggatgtctttctgaacagggcgaaaatcaattaatcgttgccaaccttgcagatcctttaattatcgccgagcagatccgccaaatattactgtcatcgtctgatgggtttgttgttatcacgcaacaagcctgggcattaactgccatagaaacggttaatccagcacaacgtagtattcgaagtttattaaaaactattcaaaaagaatatagctcaaggttaattgccattgttgatttaggtataaatgcctcatggtctgaattagttcctgcttttatacaaatagaacaaggtaataatgaaattattgttcgtaaccattgctgctacttaccacaattaaccccactgccctcatcttctacgatcatagcgcagaacatcatggtatccccgcgctggcatattattactggtggttttggaggcttaggtcgaattacagcaagttggttagtaaggcaaggtgctaaacgtatcgctattttggcaccacgagctgatagcagcgcattagattggatgaataacttacagaaatctaaccagctagaaataaaatggctaacatgtgattgtcgtgataacgctaaatgtcatgcagcactcactcagcttgaaaatgaaggtggcattgaggggcttatacacagtgcaggtattttggatgatgcacttatgacacaactcacccctaagcgtatgtctgacgtattttctgttaaagcgatatctgccaagcaattttgtgatgctttagaaaaaacagatgccagttaccttattttatactcctctgccgctgcaactataggctctgaaggacaagcagctcattccctcgcttgtggatatttagatggattagctgaatatgcacgtcgcaatatcaagggattaaccgtcatttctatcgcttggggggcatggcaaagtgttggctttgtggcagaaaaacaactccatgataaattacaacacaaaggtatgagtacgcttactactgaggaaggactggcacatttagatgcttgtctgctagataatacctcttgtcgccttgcaatgcgcttagcgactccacctttaatgacacaaaaaacgcctttatttcatcagactaatcataatgatcattatgataaccatgaaattaatcacactcgccagctttgtgaaaccccaactcaaacggatcaaacagagccggtaagccctaacagggttgattatcgcgttggtgataacttagaacagtggctaacagcatgtatcaaacaactgttgcgtcttggtgatgaacatattgatactcacattgaactattccaattaggactagattctctctctttcctcgatctcagtgcggaaattaagaaacagtttgcggtcaatattgacgctgaacaatcttatgatgatatgactattgctggtttagcctcagttattcgaaccgcagcacctgagaaatttactgtgacagaagcactccataatcaagacaacatttcccacacaatggagtcagaacgatatgccccatttccattaacaccaattcaacacgcctattggatcggacgtaaaaacctctttaactacggaggcgttgcttgccatgcaatttttgaatgggattgtcaacgccatatatgggagccggcctcacttgaaaaagcttggaataaagttattcagcgtcatgatatgttgagaatgatcatagatgatgatggacaacaacgtatcttaaaagaagttccttattttcattttattcaacatgacctaacaaatttaacccaacaagagcaacaagagagcctaacacagataagggaagccctttcttatcgggtattaccgactgagtcatggccattatttgaagttgaaatttcttggctaaataacgattgttacagattacatatcaatctagatttactgcagtttgataccatgagctttaaaattctgtttgatgatctatttaacgcctattcaggacaagaattaataccacaaacatttaccttccgcgactactgcttaaaaaatcaaacaaatcgtaacagtgatgagtggaaaatggcatggtgttactggcaggatctattatctgatttaccttctgccccatatttaccgataaagaattcatccattactgaacaacctcgttttacgactttccaacatcatgtttctatagcgcaatgggacaaattaaaacagaggtggaaaaagcatggtattacaccatcagcagggcttttaacactttttgctttagttttaggtcgctggacaaaatacccagcctttacactaaacttaactttctttaatcgtcaaccatggcacccagatgttacacaacttattggtgattttacctctgtactccctatagatatttatctagataacgactgtacattaaatgagtcaatggcaaaaatacagcgcagactttggcaacatttaagtaagtcccaagtaaatggtgtagagattttacgtgaatggggacgctataaaggggatagtagccaatctctgttacctattgtatttactagcatgttaggtatgacactagatggtgacaatattgatgaagcattaaatcagcttttcggccaacccgtatatagcttcgcgcaaacacctcaagtttggttagatcaccaagtaatggaaggaaaagaggggctaacattaaattggttctgcatggatgacatctttgctgacggtttattaacaatgatgttctctgattatcaaagcttgatcactcaattatgccaagatgaagataataatcaatcagttgataagattattgcgcaacttccttcatatcaacatttagcaatagataatcacctccaatcacgctatcaacaactcgagcaaacattggaaaatcatccgcaaatcaaacgtgctcatgctatggtaatggtaaaagacgatacgaaagtagagcctcctctacaattactgtttgaagcctcttctgatattccactatccgttattaaacagcccaattggttacctaatttactttcgccatcagcttcactcagtgacattattgaaaagagttggcaacgatttgaggaacgagcacggtatggcatatgtcacacactgtatcgaaatgctctttttaccgagctaaacacaccaatcaccctagctgaaatagtggctcgtttaaaagcaaagcctcagtatgagaggctacttagtcagtggctagatttattatgcctgcatcacttattaaccaaagagggtgatcagttttatgccacaacacagtttattaacttatgtttatctgccccagtatttcaacaacctgttaatgattgggaatatgtactttgggattaccttgaacaatcactaacccaacatgaattactctttagtggtaaggtttctcctctttcactactttttaattcagatgaaattaccacagcactatacgccaaacaccctgcactaaattatttaaatcaatgtgcaaaagatattgttagtgcaatggttggtgcaacatcttcactcaatattttagaaataggggcaggtacaggagctaccactcaaggtatagtcgcagtacttaagaatacgcattactcatacacctttactgatatatcacattacttccttgataaagcgcgaaaaaaattcactgctgtaggagaaatgcgctatcaactctttgatattaatgcaccaatacaattttctcatcatccagataatggctatgatctgatcattgcatctaatgtattacatgatgcatcacatatcggccacgcactaaaacggattagaagcctgttaaaacctcaaggctatttattatttatcgaagcaaccgagtgtcaaagtgctatgcaaatggcgactgttggctttattgagggattaagtgcatatcaagataagcgtatattgacgaataaagcgatgcttgatagtgaaagttggcatgatattttaatcaatactggttttgaaactattggtcaatggccccaaacagattcctcatctttgcgacaaacactctttttagcctctcccactcgtggaggaaaaccttatttaggtaaattacgtgattatttatctcattctcttgatcagaatatcgactcttttgagttgttccaatgtgaaaatattgaagcaacccttaatggcatagcaacatcatccgctcaagagctaaatgaacagatacaacctgttgcaatacctgatgtaccaaccaatatgattaatgaaatcattgcattatggtctgagttattaggtcgtgaggtcaatagtacaaatgatttcttccgttctggaggagatagtttgattgcaaccaaaatgatcagccaattacatcaacggggatatccagcaacattacaacagatttttacctatccatgcttagccgatttttgtgctcatttagagcaggaaaagcaatctcaacgagagtactcctctttgatacctctaagcgctgtatctgctccaaaaccttaccactactttatggtacatgcttctgatggtgatcccggtgtttacctacctcttgctgagtcgttaaataatacagtgtggggattaacagttacagatgcttcaaaactaactgatttggatacattgttatcattacatttatctagcataaaaacagcacaacagactggcccttatattcttattggttggtcatatggtgcttttattgccagttaccttgcagaacaactctcgcaacaaaatcattccgtattattagtattaatagatcccgtctatcgacatgattttattaaattttgtcatgatgactcagatagttcatcagatgaaaataagcagcttgcatgcactaaaagacttatgtcattcctacctgaaagtgacctaccattatctgatgatatcgcctgtttatggctggaagccaccaaccacccaacagaatggacatcacctgaaaaagagtggtaccaacgattaccgccacatacccaacatcactatttttcaggggagcactggtcaatactgcaagatcgcgctaccagcacacatctggccgaaatcattgatcagtgggtgcaacaaaaactttctaataacggatatccatccgaaggaggtaattaatgaaaccggcaaaaaaagtggtgattgtaggcagtaaatttggagaggtttatctcaatgcatttatacaacctcaagacaaatggcatcttattggccttttttccaaaggtagcactcgttctcgagaattatctaaagcattcggtattccactttttactcgatttgatcaactacctgaaaaaatagatctagcttgtattgttgtgcgatcagccattgttggtggcgaaggtagccaacttgcgcaagcatttttacaacgggggatctcggttgtacaggaacatcctgtacatcctgatgaaattaccagactacaatcattagcagaaaaaatgcattgccactatatcgttaacagcctctatccacataataaagcaggacgtttatggatagaaaacacacagaagatatatcagcaaatacaacaacgaccagtgtggggacaaattatcacaagcaggcaattaatttattccgccttagatatatattgccaagcaatgaaattacaccctaatgatattacagtcacattagaaaaagataataccccgctacaatttctacgactatccaaccctactggtgatttgcttttatgcctacaaaaacatttgtcatctaacgatcctgatcagcatagcctcgtgatgcatcatatgatattaggctggccagctggttatttaactctcgctggaagttatgggccagtagaatggaataatgcgctttatattcatcatcaccaagatagtaaaaaagccatgtatcaatctcctgccacgatggagcttgatgaaccactgtttcattcatttcatactccaccaaatagttggcaggatgtgatggaatgtgaagcaccagaagctattaattacttactggcagagatagataaatgctggcaattacctaatgataaaaaaccaatgattttacaaccccattaccaattagctttatctcaattatggataaaaacattgcaaacagcaggtaaagccattgatggcacaattgcgccatttaagcgaatgaacttcaccaaaagtagtggacggagaaaataatgataaaacaatctcccaaatatattactcctttaaatgagcaaaatgtaaataaagacaatgctaacctattggtttgcccatttgctggtgccagtaatagtgcatttaactcgtggagatctaccgatatttcagggttaaattgtcaattagttaattactctggccatggttgcagatttaaagaaccagcctttaatgatattgggttattagccaatgaattaataacaataataaagaaattttatccaccacggcataattcattattactttgcggtcacagtatgggggcccaagttgcctttgaaactgctattcaattagaaaaaaatggctgggaattatctggactaatattatcaggctgccaagctcctcatattcaagcaaggagattactgagtgatttaaatgatgatgactttattcaacaattaattgccattggtggatgtgatgctgaattaatcaagcagccacagttgttaaaacagtttatgccattattacgtgctgatttccttgctaccgagcgttatttttttcaaaaaagcactaaacggctttttcatacccctgttttattaatgtatggtagtcatgatagtgaagctgataaaaacgaagttgaagcatggcaagattggatagataagcattgcactattaattgcatcgctggagatcacttttatccaattacacgcccaaatactttttgtcgttttattattgatttttatcaccaatttatcaatgattaaattgattaggtaatatatatgaataaaacaatagatactttgccacttaactttcgtattttaataaaattagccccactccctctgattagtggcattattatggcaataatctcaacaatgctaagtttagcaccattatggatcatctataaaatcagccagatttgtttttcaacatcacctaatattcaacaaataaataatctagtttatatcactgtgattattttaattttacgttggggattaatggcaataagtcatattgccgcacatcggggtgctttttatattcagcatcaattacaactcgcaatagctaaaaaaatcagtaaagtaccattatcattttttgctcaatatggcagtggaaatctgcgacgtattatcaatgatgatataaaaagcttagaaggttttttcgcacatatgctacctgatctcgtctcagccatagtgactccctttatcgctattatattacttttttatgtaaattggcctcttgccttattatctctaaccccattacccattgcttttatggctcaacttctcatgttgcgtcgagccaataaacaaaccaatgagtggatgaatattcagaaaaaaattgctaatgaaataggagaatatattaaaggaatacgagaaataaaagcgtttaacttaacctcccatacttttggtaaattatctcaatctatcaattcctctgttaaatggataaaaaataatgtcaaagctagtacaggctcttggatggtatttagtgggatattaacagcgaatctcgttattatagcaccagtaggtgggtggatgtatttaaatcaaaatattgatttatctacttatattttatttttaatgacatcccccctcgtacttgcgccgttattacgactaacatttgtgctaggagaacaagctcaacgaaaacaaaccttaaaacatatcagtatgatccttgaactttcagagcataaacaacatgataaacattttactctccctaaaaatagcgatattacttttaaagatgtctgtttggatcatggtgataaaccgatattagagaaaattagttttaatgcccaagcgggtacaacaactgcaattgtaggccacagtggtgcaggaaaatcctcattattaaaactaattccccgtttttatgattgtacttctggccaaataaaaataggtcaatatgatatcaactactggccagaaattgatttactttctcaaataagtgttgtttttcaagatgtatatctatttcatggaactattttagaaaatttactcatagcaaatcctaatgccttatttgaggatattatcaaagcaactaaagcagccaatattcatcatgttattgaaaaactcccagcaggatataatacattaattggtgaacaaggaaataaactttcaggtggagagaaacagcgattatcaattgcaagagcactattaaaaaactctccaatcctacttctcgatgaaattactgccaatgttgatgctgaaaatgaaattttgatctatcgcgcattaaagagtctatgccagaatcggactgttattatgatcactcataacctacatactattattaacgcagataaaattattgtgcttgataatggaaagattattgatacaggtacacacacccatttattaaaccaatgcccaacctatcaaaaattatggaatgattatagtcacactattcattggcaattaatccaggagaataataatgattaaagaattaattaaatcaggttatttgctttctaataaaaaagataaagatttaatggtgggtctatgccttgccgtagttgaaggtctttttgctactattccgtatattctactctattttttattaattgatctttttgccaataaaatcacactagctcagttattttattactttttatcaatactcttatctattgttctgcgtattgtcattggtacttatagtatgccaatgatttttattggtgcttataaaatgatgggacaagcccgtctaagaatagccgatcatttacgaaaaatcccgattggctggttttcttctcaacgcagtggtgatcttgcatcacggcttactgctgatttagagatcattgaaaatatctggtcacatttcttaggaatgtttatcagtactttagcgatgcctgtttttctctcactattcttagtatgggtagattggcaactcactttaattatattattttctattccaatcgctctgttcgcattatccataagccataaaataatgttaaaagctgcacaacaggcagctgatgctaatgccaatgtacaatccgaattactcgattatatccaaggaattatggttattcgtagttttgggcgacttggtcctgcatggaaaaaactaaaagcagccttagaaacacaaaataaaacccaaatagttctagattccaagcctgccccttggattgcactttatggttttattcttgaatcaggttttattttattaatgataataggaacaagccgtttaattagtggctcactttctccttctcaattcgtttttttccttgtattagcactccccatttatcgacaattctttgatttaggattatccagtatgttgttaaattatgcacaaaaatcattacaacgcatagaagaagtaatgaaagtggttccactttctgagcctaaatatactcaattaccaataagaacagatatctattttaacaatgtaagctttatttatccttataatagtcaattaacattagataatatatcttgctgttttcctgaaaaaagctttactgctattgttggccctagtggctcagggaaaagcactttactacagcttatttctcgtctatgggatgttaaccaaggtgaaatattgctagatgatattaatattaaccaaataaattccgataaactctgttcatatgtatcttctgtttatcaagatgtcgttttattttcaggaacaattaaagataatattttaatgggaaaaacagatgctcacgatgatgaaataataactgcagctaaattagctaatgcacatgagtttattatacaaaaaccacaaaattatgatactcctattggttacggtggtatgttactctcaggtggagaacgtcaacgtctttctcttgctagaactttattaaaaaatgcaccaattttactgatcgacgaagcaacatcgagtatcgattgttcatcagaagtattaattcaacaagctttatcattgttatcaaaagataagacaatcattatgattgcccatcgattaaatagcattaaaaatgccgataacattatcgtaatggaaaatggaaaaatagcagaacaaggaaaacatgctgagttacttgcaaaaaatggcttatatgcacatttatggttacaacagaaagcgttatgctaatagccaaatgcaatgagtaatagcaacttgtttatagataatgaggtgcatatctggattggtaatctacaaacgataccatgtttaagtaaagctaaatccagaatgcacatcttaaataacgatgaaatttcatcgttattcgactacccttttataaaacaacgaaatatttttttgctatcaagagtcatgttacgcgatattttatcattttatttaaaaatttcaccagaagatgtaagattttcaaaaaatgagtacgggaaaccatttattttaaacgaatcaaaggaaagcatttacttcaatttatcacattcaaataattgtgttgctctcgctatttcaaatacatcatccgttggtattgatattgaatatttcaaccgtgatatagaaataaatagcattatagattattatttctcaaaaaaagaaaaaaaatacctatcttattttgacgagactcaaaaaaaacataatttctataagatgtggacattaaaagaagcctatattaaatcaagaggcattggattatcagaagaaatcattaagaatttagatttttatataaagagagatcaatttgataaattatattttatagaacagcattactctgctcatctttcatatattaccaaatcaatattagatagctataaaatatccataatcacatatcaccatccatttaactataaattcttaacatggggtgatataaaaagcaacctgccacatcatttattatagttatacgaccacaatgaaattatatattaacagttagttttaagtattatttgactgactataggtcatataaaagatatgacaattcaattcatatattcacaccaaaacacgaataaattataaaaaaccatcaatatattagcactcatataaataaggaaaaattatgtttaacaataaaacaaaaaatactattattaaaaataaatccgattggttaaccatacctgaagctgtatacctagccaaccagaaaaaaacagagaaacaattaaccgacagcgacgtttatcgccatgcgctatcttgaaacatttatttatctatatactttcaatctacaattatattaaggaaagtcacaaaaattaagaataaaattaaattgaaaaaaataggaaactctctcacagatcgtttatgctatcttgatacacattgtttcattaaacatataaattataccacactcactcaagataaatatattcattctaaaaaaatgggtcattgataccactctgatcgggtatgaattcgtaacaattcaacacttactggcgcactcaatcaatatatcaccaccaatcacaggcaatcaatgtattaattatggcatttcagttttattatcaagaactctatttcaagcgtttgagaaaataacatgaaaagaacgaattagccaacaactaatgtaattacctgaagaactaaaatctgagatttataacaacattaatcgaatgaaactcataaatccagtgacaaagaatatttccctatttataaattaccacaagattcctgttttgtaattcgcctgactgaactacaaaagctgatgaatgcctatgtaaatattaaacacactccaacatcgacacgcatatccagccctttatctcgtcttttctggctttcatgtaaacataatgaagtcatcagtccattactaggaaaaccttacaagcttttatccattttcgaacaatgggcatctaccgaaggtattactgacaaattcagcggcgatacactgaaaacagcacttgaacgcggttctcccacttcagtgccttattgatttaactcaccattatactgaaatacgtattaagaactcaaaaactcttaatacgggcttacgtgctttcttcttcaccttcgcttatgcttttttatcttctccaaccccactctacactggagaaaatcatgacatcacatcagttattacgcctgaaacaggtcgaagaaaaaaccggtctgaaacgctcgcaaatctatctgtatatgaaagggggctcttttcctcgttcaataataaaggttggccctgccagcgtagcctggctcgaatctgaaattgatgaatggatcaacctcaaattagccaaccgctgaagtgtttaaggaaggtccgaaatcatgattccgtctctgaattacgccgtattaacagatgccctgcgtgcgctgaaagaagacaatattcaccatcgtgaatctctgggactcaccttcgacgaaatgaataccctcaggacaacactggtgctttaatgaaaaaacgaaatttcagtgcagaattcagacgtgaatccgctcagttagtggtggatcaacactatacggttgcagatgccgcaaatgccatggatgtcggactttccactatgacccggtgggtaaagcagctacgagatgaacgtgccggcaaaacacctaaagcctcccctatcacgccggagcaaattgagatacgtgagctgaagaaaaaacttcaacgtattgaaatggaaaatgaaatattaaaaaaggctactgcgctcttgatgtcagattccctgaacaactctcgataatcgggaaactcagagcgcattatcctgtggccacgctttgccacgtgtttggggttcaccgcagcagctataaataccggaaaaaccgtcctgacaagccggatagcaggctagctgtattacgcagtcaggttcaggaactacacggcctcagtcatggctccgaggatgcaagaagtatcgccacaatggccacacacaggggcttccggatggaacgatggcttgccggccatcttatgaggaagctggggctggtgagttgtcagcagcctgttcaccgatatagacgtgggggacacgaacatattgctatcccgaatcacctcggacgtcagtttgcagtgacagtgcctgaccaggtatggtgcggcgatgtgacgtatatctggacaggtaaacgccggacttaccttgctgtggtactcgatctatttgcacggaaacccgtggggtgggcaatgtcgttctctccggacagcaggctgaccaccaaagcactgaaaatggcatgggaaagacgcggtaagccatccggggttatgttccacagtgattagggtagtcactatacaagcaggtagttcaggcagttactgtggcgataccggatcaggcaaagtatgagcaggcgcggaaactgctgggatactcattctaatatactttcaaataccggatcggactgacccgtgctgggattggctcaaatgcctttgtgttgacctgtcgtccgattctggtatttcccgggcataaccgggcccagagtttgtgacctgataggagctttgtgctgcatcccgagtgtcctgtcctgcgatggggatgattgtgctaccaatatctggaggcaaaccatgcaaaacgaccgccaatcttctgaaaccgtgattctgggtgtcgatacccatcttgatattcatgtcggcgctgttatcagtcaggcaggtaaactgcttggaactcacattattcaaacaaatcaagcgggctatctggaactacttgattgggcacgttctttcggtagcctcgaacgagcaggcatcgaaggaacaggaacatatggtgccgcattaacacgctatctcatcaagaatagcatttatgttgttgaagttaaccggccagatcgctcaaaacgccgccttgaagggaagtcagatccactagatgcagaaaatgcagcccggacagtgctttcagggagcagcaaggccataccaaaaatgcagtcaggtgcatgtgaggctctccggattattagtgttgcccgacgtaatgcagtaaaagcctgtacgcaggcgattaatcagcttcgtgcactgctggttagtgccccgcaagatgttcgcgacaaactctggaaatcgaaaccacacgaatgcgtaaccgcctgcattaacagcgaagtgtcagagcactcaccgttacgtatagccttgtgcagtacgcttcgaagccttgcgaaacgatggatggccctgactgaagagttgaatgaactagacgaatcactagataaactgacccgcaagtatgccagtaaccttcgtagccagtttggcgttgggccacagacggctgcaacactgctggcagttgcgggtgataaccccgaacgtttaaaaaatgaagcggccctggcatcgctctgtggcgtaaatccactgccagcatcatcagggaaaacagtaaggcacagattaaaccgtggtggctcacgtgaagcaaacaatgccctgtggacaatagcccttgtacgtatgcgtagcgatccgcgcacgagaatctatgtcgacagacgaactggtgaagggctatcgactaaagagatcctgagatgcctaaaacgctacatcgtccgtgagctctatccattgattttatcggacctcgcatatgccaatcgccgctcttgacataggagcgtcaacagtccgatggagcgctttttcaggagtctgaaaaatgagtggatgccggtgacaggctacaccagcttcagtgaagctgctcaagcgataacgggttatatcgtcgggtattacagcgaactcaggccgcacgaatataacggtggattaccaccaaatgaatcggaaaaccgataccgaaaaaactctaaaaccgtggccagttttagttgaccactacaaaagcttattgatgaacgaactgatgatgttttgtatggtgaaccatgatacaaaaaatggacgatgggccgaatgatctcatttaatacatcttcgccttataccaacgcgaatggaagattaaaaaagtgggcaaaaaataataacaatttaaagtaagcatcagcgtcaaattaatggccgaaaaatcgctctatgcccacatccttaatctgaccacgccgtggcaggttaaatcccttgctctcaataaaaatgcagattctgtaaccggaacaaagaattcttcaaggtggcgataatattccattatggaaagctaaatatggctttctgagccttattaccatgactaaggaataccctattatcaacagtataaaaatgtagtttgcaggatgagcgggctctttaccgtccgcattcgcagggaaattgaaatctatgtcactctgccagatccaaaaataaggttaaggccgcattcctttgcggcgtcttattcctctgttcagaccttatccatcatataacgatgcgctttcgatgctgcctggcggctttaaaaatatagcgcttatcgtttttcagtgctttcagccaagaagcaatataactttcgtgctgaacctatccgacaatccccagatccgccatcaggaacacgcttcccagctcggcgatcaactcttcaaatgcataattttcactgctaaatcttcctttcatttcgcggttcaggcgacttttgccatcgctccagtgaacaatctcatgcagatccgtggcataaaagctagcggcatcggaaaaaaacgacgttcaggtaacaaaacctcatctgttgatggcatgaaaaaggcgttttgtcctttctcaatgatgttagcaccgctgttacagaacagattttcagcctgtggcaacgcgtcaaacgtcgcttgtggggcaacggtatctgccgtcagtgagaggccatcaatttgttcgacattaaacacgacaaaggttttcagcatcgggatatggtcaatttctccggtgtcgttttccttctccaggatggtataaaaaatggcggtcatgccgtgctagtccttacgaacttgcgcaccttctgccctagcctgtttgtatgtcatccagcaggaatcactgaatcctcattctgattcactgcacccgctgtaggctgtgccagtagcgtagttggaaggcatgccggacatacccggtacgcgctgccacggacacactcagggtttaacgcctacttccagtgtggtaatgatgaggtcggtaacgatctgataaatatcggttctggttttggaaaatttcgtttttgaggagcctgacgggtccagcggggatacgctggtcgccgttgcggtgttagaggcacttgtctgagtatgcaaggaagtgatcatagttttttctccatcagtaatgtgattttcatcttcgtatcgcctgacagttcgctttctcggcatcgttctggcccacaagggtgcagcatgcgtgcacttcacccttacgggaccggttgtgccgtgaaatgattaaccggaagctgatacgggaacaaaaagcacacaggaggaaaaatcggtccctgcatagccgaacttagcgccctttactccgtattggtgaaaagtagatttgtggtaatgaattggggattggtactgatagaaacatcttgttggcaccgagatctcaaaaaatgtctagaattaaaacaggtgtgcttaccttaatgtgatagagccctaaaacatgcatcttcaagttaattgtgcatgattataaaaaaaagaggcacccatagagtacctcacttactttatatcttattaaatcagaatatattaaaaatcaattttgacatttatcccataatttcgacccggtaatgggactaaatatttcaattgagaagatgcaggtcttgcttcagtatcggtgagattattaataataaaatcaaccgaaacatctaccttatcaaggtggtattttttgccaatccccgcatcaactaacgtataggaaggaaaggccatatctccaccatacattaacccaccgctttctttttgttttttatagtaagttgcactactaaatgcagttaattcatcatgttggtaataaatactgataccatgcttttcattaggtaaatttggcaaatagtgacctgcaataaacagttttcttttgcttttattttcgacaaaatcaccaaatagtgtaaatgttagattgtgatcatgaggcatttcatataaatatttaaattcatattctaatccttttgtttcaagatcggtgtcatcccattccataacaggaccagcaccacgactgatacccgttaatcgtctaaatttaaaaccactgtagtctgttttatacaaattaagtttattagagaaattgccaatctcaataacagatgataattcaatacttttgcttttttcggtattaaattcactgtttccttgttcttcaattaaataagcataatgagggccatgtgtataaagttcattaatttctggtgctcgataagaaatattttgttgtagttttaatgtccattcatcaattggtgtaaaagatagagcgagtgtatttgcacttgtatcaaaatgacggttttgtaaattagaaccttgccctctaccacgattataattcgctggaatattgagattatgttgagtgtaacctttacgatatccagcagtgagctcaaaaggagataaatttagcgattcaacccaatatattccgtactctttggttaatacactgggtaaataagcatcataaccagacgttttcagatcacgataattaccgttgatcccaaacgcaccattaagtcgattaaatagcggagtatgtgcagtttctaaagctaactgatggctttttgtattaaataccgatgaagcaatttggccgactaactcttcatctttagattcagaataagaataataaaaagcactgtctcttaaaaatggtgctaaatgatcatgttttccttgtatatctattcttcgattactatttgaaaccgaaacaggtttatacctttctcgagttgttttagttgtgagataagcatagcctggcactccatacgatgtttgaaaatcagtgacagaaaaacctaagtaaccgtcatctccgatataagagagtgatgcgttaccactttggctttttaaaaagctattgggaatttcgttattattattttcaacataatgctttggaggtgtgacatgttcaatagatgtggggctaccaggtttatatcgtaagttaggttcattatctacataaccaatacctgaaaaatagtccttatctttaaaggtatatttatcatcctcgcttaactcatattcaacctgatattttttccaaaactcactaatgtaaggatacgcttcagggttacggctagtaaacactttcatatccacttggcattgatcacgtaatgcagagtggtcttttagctgttgatagctatagcaagcaccaactttagagcgtgttggaattttatattttgagactcgtttagtagcaccggaaagattaaaaatccagttttctttattactgaatttaatatttactgatccaccgttaccattattagtgctaccattaaatgtcacggcacctgaaattgctttttcaggaaactgtgtcattattcgatcatcccacaaatgaattgcaccaccactgctgctaccaccataaagtagtgcttcggagcttttactaattgatatttcgttaattctattcatatcaacaggaataggcatattcccactaataaatgaaacatcattaatcggaagattattaactaaaatcccgactctattgccagagagacttcgaataacaggccttgccgcatttgggccaaaaccttccgcttgtacaccagcaacttttgaaacggtattaccaatcgtatttgtttttatttgttcaagttgttttccttttatctcttctcgattattgagtaataaagaggagaatgtctctttgttttttattgatgttgctttaacagtaataacatcgtttgatgtttctttttcttggcttttatcttgattattctcttttccatataaaggagacgacaaaagtataagtaaaataatagagagtttactttttttcatgatattcatattagaatgtaagagtagcgcctaagataatattacgaccaggtaaatacatttcatctttaatataagaggtgctgtctttcccttttacatcaaagatattattaatcttggcgtataaggtataatctgtgttatctaaataaccaatatattcactacctaaactaactgtgttataagcctctgtggatgtttcatagtctgctgttttattctgttttccaaaatgatcaatgcgaatttgtccaattacgttttctgtaaaactatgtttaatataagtacttaaacgataagccggtattcttggtatatttcccttattgtgtagtaaatttgctctaacataatcaccagaaataccaattaagctatcttggttatagtaataatcaatatttccttctatacctttaaactgtgcatcattttgaacatattgtaatgaacgatagccattatttaattcagtccccgtaaattgaccgtaaatataattattaatacggttataataggcactcatattgaattgaatatcacctgttactttagttattccaatatcaatattatttgcagcctctgcggttaaattaggatcgcctttttcaatagttcgacttgcagcatgaacaccattcgcgtaaagctcttctgcaacaggtaatcttttcgtgtgtgaaagtgataaatttaaaaaatagtcttgtgtaaaattccatgctaatccagcagaaatagaagatgcactctgcttattatttttttgagtttctctatttaacagtgattgccactcttggcgaaatcctaattcatagcgaaaatcacctaattggtattcttctaataaaaagagtgagtgattttttgtttttgttgacggtacataagcttcttctccttgagcactaaaatcacgctggttaaattgcccgccaataacaccatgccaaccccaaataggttgatgtgtaaatgtcagtcttaattcatcgcctttgtttttaaatgaggtactgacttcatttccttctttttcatcatgatgataatcggttctgaccgcactgaaacgtattgattcaataccagtaaatggattgtttttttcaccacgaagatcccatcgtttgctatccataacaatataaggaataccatgttgatgttgttcatcagggtattcatgattgtgattatgatgatgatggccgattaaaggagggcgaattggggcgtgatgatggtgatcatcttcatgatcatgaaaatgcgtatgaccaggcagcccatatcgacgatgttgttcaccataaccaatccctatataaccgtcatcaaaaagccaggatacaccaatatttgccgattggttatcttgataagatcctgctaaacggctagtttctccttgatgtaaaggttctggttgtttgtaatcactttgataacgtttagtaccctcaaggcgaagcgccaaattattttctcctaacgttaatcctactgatcctgtatttcctttagaaacagaatcgtattgataatgcaattcaccctcatagcctttttcaggcactgacataggaatcttgctatcaataacattaattgcaccgcctattgtgcctcctccataaagtaatgttgaagggccttttaatacttcaatgcgttgacttaaaaagggttcactggtgattgtatgatctgcaccaatagaggatacgtccataagatcactaccactgtgtaataccttgactcgattgcctgacattcctcgaataactggatgaactgagcctccaccaaaaaagctggcatgaaaacctggtaaggatgttaaggtttcagcaatcgaggcactacgattagcgcgtagatcttcttgtgtcagaacagaaacggggatcgccattttctcttgcggagtatgcaaaggtgttgaatagacctctaatacctcattgttccgattttcagttgattttattgcagggcttgcatttgcaaataaggaataactcattgaaataaaaaatgttgtataattaaaaatagattttttcatactatccgccattttttgttatgttataacatatcacattgtatgtatatataattatcattagcaagtgattatttaaaaaataataaaaatttgggctgtcctagataaggtttaagttttaactatctgttttagaatacttaattgcttctttgcagcttggcgtattaaacgggttattgttaaatctggtgtatggcaccatcagacaatgctccgatctgatgcttcatcctctgcatactggggttgacggtgtaagtatcccgcataattaatttgccaacgaaggagatcgctatgcgtaaagcctgttttactgagcatcagatcatcgccgtaattaagtcggttgaaaccgggcggactgttaaagttgatgactttaaccgtgagacattgtcgattaaaatcattctgaatctgccagatctgcgaatgatccgtgtactcgacaggatcgcggcaaactgcggctacccgatcatgctgcacatgaataatggtccagaatttatctcactgatactggctgaatgggcagaaaaacatgcagtaaaacgggatcttatccagccaggtaagccgacgcaggacactttcattgaatactttaaccggacataccgtacatacgcgatttttatatattcatgatcagacgtgagataaataacgaattggagtgggtttaaacaggttataacgaataggttactgtaattaattttcagtatatgtaagagaatttcgagtccgtttaccatgctgtgtaaacgcctttttcaaaagtgaccatcctggcggtcgcggtcaccgaactcgacaataaagcgactctattactatacgccagttcctcagcggcattgtccatttttgcgaggcaatccgtcagacagtgcggggttaggattgaagccacagagcaccgttatcactggatacaatggtacgttggctcaatctcaggctacgtgggtattgtactatggacgcttttgtcaatcagtaatggattatatagccagacatatcgatctgtaccttgctaaatgggttacccgtaaatacaagaggggacacggtagtctggttcaagcgtatgaatgattagacaggatccggaatgttaaactcagtttgtttgcacactggactatttgtacgcgatgttaccagtcaactacaagagccagatgacgggatactgccacgtccggctccgtgggagtggagggggaaagttcccctccacgacgcgataacctcatataatactagaaaataaaaatcagataaatgatagtgttcactactttttagtgatacaccttgcagaatgtaccattgcaacaaatcctgctgctatcatcatagtatctttcagaactaaccttcccgcaccggaaagataaggaaactcagtatgagcatctgctccatgtacccaggtttcaggtgtaaacaccaaaaatgttaatgtgacaaatggcgtaagaaacactaaggcagagccctttccatttattattaagataaacatcagcatagtactttcctgctggagttggatttccttgattgaaacgatgaatatctaacgtcgtcttcccttgagtatgctgtaaaaaactgggatcaaattcagcatattccatagccactgtgtccatggaaaaaactcccagtgaaataaatatggcaggcaggaatgaatgatgttcagtttaagtgcaatatttcataaatattatccttatttcagagctgactcacttaattcatgcccaccataatcgttaacaactgtccacttcacttttccatatcccgacatatttccatgtataggaaggcgtattgaagaataaggagcaaccatatctactggattaattgattgtgagtagttgctctgaatcaaagtaatatgattataagtaataaaataaggactttgattatctgcacaaagaaaggcctttgctccttgtttttcaatatgccatataacagaattataggcctcactgagagaacgtgtgagtttttctggacgatagaatagctttatgcgactatggatcgggagttgaagataatttgagtttacatttaaattatttttattttcaaatttaggtttagctgaaatatccagtatatttagccaaaaaattgattcacgatcattaggcagtgcttcacccgtatacataattcgtaatgtttgccctgtgtgaggttctatacgaaatataagcggagtaataataaagggaacattgactgagtctggagcaacactggcatcaccagtatcaatccaggactgaattaaagatggagtagattcatcattattaattttaatattaataccttcctagttttcaggataaataactcaggtacccaacattagcataacttgacacagaaaataagccggccatcatgaaaaagaaaagttttttcatggaaactccgaacaaagcagtgcagatgagctgccttgtaaataatgataataaaaacgcacgattattatttattactcataggcaatagtgtaattaacactagaaatgacatcccctacaattgcttttcctgtagcataatattgggccatatagcgtagtgtcgcttcatcgtcactattaatagcttctgaatggacatcctgtccgacaaagtctttccctaattgaatagcagtagtaccatcgttatttaataactgaatttgaacattttgtgctccgtcagagcttgcattttttagtttgttcgtattaaagtcagtattagctccgggttcaaaaaaagctttcacattactagatccattttgtccagtagtgcatccagtaagactaattgtaccgtcatatgccattgctgagttaaaaatagcaacagacagtaccgtacttaaagcaatattatttttaaatttcattatttggttactaacataaaaatcaatctataaacttcattgagggtatttatatccttaatttatatattaaaactataaaaaacaggtgctactctattaaaattattaaatataaacgccattatttaataaaaaattaataacattcaccaacatgaaaaatacggaagctttatttgaaattacaaacttattatttattaaaatgtaacctcatgtaattaaaatataattaatggatataattttctttctaaaaataaattatgttaatatgttattattgatcgataatgtatttttttgatagattaaaaccatcaatataaacataacaatcgtttttaacgatcatttttaacaatttatactgattgtaaaactcatttatattgatatagaagggaataggtaatacagaatatatttcaaagtatattttattaatcttaatgactatataagcaaatttaaaaaactttaaaataattatttagaaaataaatatatattaatgcaaccattaatgataataatttataatctttaattataggaaaggcaccataaatacattgtattaatatttataacatagacttggcgactatattaatcacctattcttttgttaaaaagaaaacaacaaataacaaaaaataaatatatgaattaaagaaaaatcattctttaaatgatataccttgatctgcatcacagtataattcggatatttaattacatataacttatagttgttatatataccttaacaattaatgaatgcaaaaatagaaaataataaccgattttgaccacatataaaacttattacacatataatgatgctttcacatttctcatgttttagttttaatcttttcagcgctcaaagataatctctctattggcttctatcacgtggtttgcatattttcatcaaatggatagtcaatctctttatcattatatatcacatttaatgtggttataacgagctcttattgaacattcatatccttggtttttatgcacagtaatgtgcagctaaacagcttttattcctagtcattttgctaaaaaaagattactaaaattataaaagccaccaacctataacattattttatatccgtgatgacataaatataaataaatgaaatattttcacttaatatttcagcaagattttttaccaaaaaggaattaaaaatgaaaaattataaagtcgcagtcagctatgatatgtctgactctatttcaactcatcgtaaatatgttaatattctacatactgacttctcttatattgccgcaattattatttcacttgataatattcaagatggaaggctcgattttattgaacaaaatagctttggacagcctgtattcgctattattaataaagataaagttattccgactaatattattaatcgattaacaggtgtaattgatttaaataaaaagaatacagaccggattcagccggctgttcccagactgaccgataatatctgaccataaagccgtttctaggctgcatccacttcccgctgaaacgccagctctttttctgcccaggcaaattcctgctgtacccacttttcagccagccgacagcgctcctcatctgaccgggcctcaatgcccagtgtcgtcagaggatccaggccgagagactgaataccgcgccaccctttcatcagcgcttcaaaacgggcatactcctccgcactcagtccccattcctgcgcctcatactgcaatgactgagtctgactcttagccgatttccccgcctcaatctgccaatctgccccccggaaacagactgtgtggctgtcagcggcgctgtcatcagacacccgctcagtaaaaccacaaatcttatgtttttcatcacggcatctcttttatggtaggcgcaacgtcaccgtacgcccctgataacgtccgcccaccggcagtaactgtaccagccccagctgatggataaaggtccggaagtaccggctgggcatgaccggtgttgaccagaatcgcggtatctatcagccaccggttcagcaggccgggagggtttatctgcacagccccccaacagcagtgaggtcagggcaagacatatcgggagaattttcatacgcattttctgtcctgtgttaataaaataaagtcacaggcacactgtgcgcagaaaagcaagtgctctcaatgagaaattagttttccgaaaaaaaaaagaaaacggcgggcataaaaaatgccggcagtcatgccggcatttgagagtaaaaacagaaaagattaatgttttaatgactcaatcttttcccgggtcagtccggtacattgcataataatgttcagatcaaccccctgttgtaataatgagcgggcgactttttcaacacccaggccaatacctttttcgatacctttttcgatacctttttcgatacctttttgctcaagttgttctgcaatcgttgtcagcatcgttttatactccggtgacagtgcaatgaattggctgaaaaagcgggattcatccagaatatacccctgataggcaatatattctatcacactcctcacctggtcaaccgtattgtgttgcgagttaattatctgcgcgattatcggcaataccgccattaaaccgtcgcgggtccgaatatgtttctgaaccagctccagcagggcaatacccttgtgtgtcaggatttcctcatcactgagcacactcaaatccactaacggaaacgaccgggtatacagctgctgagccagcgccggatcggcgaacccgtccagccagttcatgctgtacggataaggacaaacactgccctgataaaacagaaacggcaccaccaacggcagggtcttatccgccggcgattttttcagatgatgcgctatcgctgacatcgcataatgcatcagacgaaaacccattaaccgatccggttttgactggtgctcgatcaggcagtagatatacccttccccttccgtcatctgcacggaatacagcacatccgaatgcagctgacgtaaacggcgctccacaaaactggccggctccaggcgcagtgtacttaaatcgcacaaaggcaggatgttggccggcaaatgcaccgagaaaaaatcccgggcattctcaggatgcgttaaaaactgcttgaataacgcatcatgtaccggttgttgtgtatttttagtcacagcaaactccttattaatgactaaaaagaatcagccacatactctctggataccggctgttcagtctctggtggtgttgactggtgtttctcggctttatataccacttctttaccgattttaatccagtcaatattcagcagcctggctttcaggctgacccgctgttctccggcatgctcaccttttgtcagggtgaaaatatcggaagccaggttacttaatgtaaacccggttaggacttttttgtcctcatccaccgctttgatacaccgtctgaccagtgagaccgtattctccccgacaacggtcgtatcaaaacgaacatacacagggttatcagccggtccactgagtgcattaatcactgcggttaaaaactgccctttagggccgttaacctgacggatattcgataaatacccaatcccgttcacatgcagattaaagtatttattttcagatgttgtattatttttgctggtcatgatgtttctccatcggataaaaaaggtaaaaaaatgagaaacatcgtctcggcaggaacgtgtttcccaccggggtcagtaacaggaacgctcccgaactgacgacttgcgttgtataagatgatcctgatgataacgctattctgttatcaccctccgtcaatttcaaggacgaacggagttctgtcatcgcccgtaggctcccgtctcagatgacccgaggattggcagtggcaatcacccgtaggcgttcctctcagattgccggaacattggcatcgttgtcacccgtaggcgcttctctcagacaactgaagcattggcaatgttgcattaagcaacggtataagcagaataaggattaatctgctttttttatttgtcaagtaaaaaagcagttcagagagaaaaggataaacacagaagaataaaatggataacagaaacaaactgaaagtctggttacagcaacatcatctgacacaaaaagacctggctcaactcattcagcagacaacaggcaggccctgttctgtcagggcggtaaaatcctggttatgcccaccggaaaaaaacagcgcccggccctgcccggactgggtgattcaggtactcagtcacatggatgaataacttttttgtcaaataaaaaaggcgttacggttaataacgcctgacagtgccgcccactctgtgatgttaaaaagaacctcaggagttcaaccagctccggcgcggttttcatgaggttgatgcgccttaaagtctgtcctgctgacagacagactttctcattgtcgccaccgcagttgttccgctacggctttgccgcaatgacggggggcttttccctagcgtcagctatgctaacggtaattatcactcaggtaaagagtcctgttatgctcttcttcacggccttctttcttttattcatcccccgggtaaccccctgcattttttccggtaatggtacactccctttacaatccggataacgctgacaactccagaaacggcctttactgctctcccgtaagaccatctttccatgacacgacgggcaggatggcatcggtggcagatccagcgccagcggcatttccccgccttttttaatgagatgtgccaaccagctgatttgcttttgcataaacacatccagagacagatttccctgtgcaacctgctcgagtgattgttcccataacgccgtcattcccggatctgtacaggctgccggcagggcatcaatcagctgacaaccggtgtctgtcgcccggagtgtttttttctgcctgacaatcaatttcctgttttccagtgtggtgatgatccctgcccgggttgcctctgtccccagccccgcattctctttcaggactttttttaatgtcggatcggtaataaaggaggacgcattcttcatggccgcaatcaatgtaccatccgtatacggtttcggtggtgaggtcgccagttgtacaacctttgcctcctgtaccacacagaattcaccttcgtgaagggacggcaatgtttctgttccggcttccagcccggtttctgcctcttcttttactggcggatcgtcttcatgtttcacaaataatacagaccagcccttcactctttcgactttccctttggcaacaaattgttgtccgcctatatctaaaaacacctctgttgcatcccattcctgatccggcaaaaactgcgccagataatgggcacggataagtttatagacattcagttcagcctcattcatggcgttcaaatcaggtgtctgccgggtcggtataatcgcatggtgagccgtaatttttgcatcattccagacccgggaaattcgcgccggctgcaattgtgccagcacattctgtaaggccggatcgctttgtgataatgcatctaaaacaaccggtatgtcggcacgcatggacaccggcagatacccgcagtccgtccggggatacgtggtggccttatgtttttcatacagactttgcgcgatttcaagcactttatccgcagaatacccccaacgccttgaggccgcctgctgaagtgtcccgagatcaaacggcaacggcggcaaggcttttcctttcgtttcattcactgtacacaccgtcgctttccctgcctgccggcacagttgctctacggcctgagcggcctgaacgtgaatacaacgatgttcatcatcacaatactgcgaggcaggtcgccagtgagcctgaaaaatgatcccctgatgctgcaacgaggcggtcacccgccagaagggtttggaaacaaagtgcgtaatttctctttcccgccggacaatcagggccagtgtcggcgtctggacacgtccgaccgacaatatcccaccaaaccccagttcccgggctttgagggtaaacagacgcgtcatgttcataccgataagccagtctgctctggcccgccctaatcccgctgaatataaagaggccgttttctcgccgggtaacaggttatttaatgcctgcctgatactcgcctcatccagtgcagacaaccataaacgttgtacctttttccggtaatgacaggcctccagtaattcacgggcaatcacttccccttccctgtccgcatccgtggcaatcaccacttccgtcgcctgactgagcaactgttttatggtctgaaacaacgaaaccgcgtcttttttaaccaccattttccactgttcaggaataacgggtaaggcactctgccgccagggggccgcaaactgtgcgccataagcctccggttcagcctgctccagcagatgacctcttgcccaggcgacctgaacgccatttccctgaaaaaaattatcccgccgctgatgagcgccgatcacccgggcaatatctttggcctgagacggcttttcgcacagaaataatttcattaccctgttctacctcctttttccggctgcaacgtcattcgcggttttaaatatttcctgaacaaactccggagtcagggtatcactgtacgaagcgctgtaagtgatatacatgtgtgttcccgaaccatttttttccagttcgatgacgatatgtgccggcgggttacgttttcccatatccgcccccattttataataacttcccggcgtcacttcccattcccagccccggctttcttctgcaatagccgtggcggcccattgatcactttctttacctgactgacgcagagcacggattttggtattcacatcctcaaaaccataataacggcgcagacgggctgcggctgtatcaatatcaacagggataaccacgtcatactcccgttgttcccgtttctgcataccaccattcatggtatgactgacctgatgccccaggtcactgattttctgattccattctgcgatttcctgtgcagagcatccggtcaaaagccataaagaaaagcataaggtaagcaatccgctttttttcattgcagctccttattattaaataattaacccaatataaataacattcgttatttttttaaagacggtaaaaatgacgcacgttttcttcctgaaatgatatccggatcaatttcacctaaataacgggaagcctgttgataagtttcactgtttaaatcaaggttatgacgggtgagctcatatttccggtagtttacggccatccctgtcacatgacgaacctgatagcccgctaatttaaggaccttgtcacgttgctgacgggaaataaaaccataatgctctccctgcaatacacgcaaagcaagttgatcaaccccgacgagtaaccagacacatttataaccaacaggagatttactgaatatcgccaggtcaacaggagatgttgatgagatatccgaaataaccgcaaccgcaggtaactgaactaattgttgttcaacctctgaaagtaatttctgaatagtccgagtcccttgctccagtgcctgctcaagctgatacagccacatttctgcatataagtatcccttctttgcatcatcagtaatatgacccgcccgggaaataaacatcggaagactggggatcatccatttacgctttttttcgtcaccgtcattctgagagttgggtacaacccgcccttcccatagccggattgcataactggtatggagtttcagtgttaatgttgactttaaagggccagcctgaagtaactgttgagaatgtttattttgttccataacaatacccttgctttgagaaattgacataccgtacaaatgtcaaccccctatgccaacgataaattcaaattgaaaaaaataatttattataaaaacgtagcgttactcgtcatcctactgaaatgcaggttaacctttgagcattgtttccaccggaaacatcagtaaatagttaagggtcttcctctgttgtaaggggagtagtacagtacctaattgatttataaacaccatacaatgcatttatggtgtcttattttaaataagaggaaattcttcatgagtgtgccacaaacaaaagctgagctgcttttagctattgataaaagttttagtaaattaattagttacctcaacgcaatcccgccagaaatgacttcagataactcaatggatggacacgccaaaggaacgaagataagtgttcatgaccttgtttcatatctgcttggatggaatgctcttgttgtaaagtggatcacttttgatgctaaaggtctgcctgtcgattttccggaaactggctataaatggaatcaacttagtcttcttgctcaaaaattttactcagattacagtgagttaagttatgaattgttagtagctgaacttcaggctgtaaaaaatgaagttgtgaaacttattgatgagcgtaccgatgatattttgtatggaagactatggtacacaaaatggacgatggggagaatgatctcatttaacacatcttcgccttacgccaacgctaatggaagattaagaaagtgggcaaaaaacaataagatcagtttaaagtaaatatcagagtgaaattatatgtacgaaaatatctctatgcccatatcgttaaccagactgctccatagcttgttaaattctttactctcgatgatgcagatttcgttacggaaagcgaaatatcgcgttccggaccttcctacccggataagaaaaacccaatttttaaacactgtttccagtggaaacaccggttaagttttgagcactgtttccagtggaaacaccggttaagttttgagcactgtttccagtggaaacacgggtgatttattgaatacgccttcattgctcattggatatccctatgagcgtacggcgaaaacgctgaaggtactgacgtgcaatatcaggggcacccatccccccctgagacgccttacttctctccgttctctccggtttggtttgcgtgtgctgtgatacatccggagtacctgacattttctgtaaagacgcacttttcatccccgtttctgctggggaaacggagtgatatcgcccttcacgggctgcctttaatagctgcaaggcataccccaccggattacgtacacttcctgtcctcaccccctgtgtcagttgctgcacaatcgatattgcggcttcttccggcaacgcctgtaactgtttttccagcatctgccgatcattctcatcaatccactgatgcagcccctgcacctgagtacccgataaatattgctctccctgatctacgtacgtattttttacactctgtgtaaaagtattacgtacgtaacagttcgattttcgtacccctgaatcagactgggtttgtgtactcagttcgattttcgtacccggttttttttcatcatttttttccctgagttcgattttcaaatccggtgttttacactgggctcgattttttttatgtttacccggatgaagttgtgccgtctgcccattgagtatccggcgttgcctgtctgccagcgcttccggtgtctgaagactttcaagccgctgctcaatgagttgcattctggtatgctgatgtcgcattgacggctcggttttcagggcagtcagcgcagcgcgggccacgcaccgcacactcttatttttgtgataacaacttttttccagtacatccatccagcgtggatctaatgtctctgcatcaaatgcattcaccggctcatcatgtaacatatagatatttcctctgatacgcccccgtttatccctgacccgatggcataaactgagccagcccgtcagcctcagcattaacagtgccctgctgaccgtttcccgcgaggctttatcgctgtggggtgtggctaactggagttgtaagtcatcataggtcggaaatacggccccctcattttgctgagcatgaaggcggatcatcatccaggtcagtttatcaaccggggaaagtcgggattccagcaataattgccgggggattgcatcatgaacattgccggcgtaaatcaatccactgcgcagtgccgtgccgggctggctgtgttgccggtgatgcagttgctgccgcattttttctaatgaaaactgaataatactgtccggaggaaattgcatcttatgccccacacaaaaataatttcatgcctgaatacacttatagctgcctcctccggtgaaaataccgcaccgtaaagaggcagtctcaatatactgaggatcatgatgttgaatattctgcccttaccggctaatcatcttgttataacgttcatggctcatcagcttccagctttgcccctggtccatactgagcagacgccagaatgcaccaatatcaattttcaataccgggtaaacaccgcccttttttccaccgcatttcacttttttacaaagtcgttctcccgaaaaataacgtagcaataacccgtttgccttccgctgaatatgctccggaacaggcgtgacacattccggaaatatccgggcggattgatgatgactgatattcctgttatccggcatgatatttccccctgtcagctgaattcagtatgccgtcccggtgccattcctgaaccgaattccataccgtggtcagagagacattcattttttcggcacaggacaccatgatctgaagacaatccggatcatccggctccggcatgccctcctctttccagcgataccataattccgtttgctgcacatctgacagccgctgtgaacggccagcatttccccggatcccggacaaacgccgacgggctgacacctccagtgacgtcatgccaaaatactgattcagcaaatcgatggatgcccccagtctcagacagcgttcaatcatctgattttgacggtgaacttcttttgcccgggtcagtaataaccgtaaattctcccggtggatctggcaggtaataatggagaccggactttgagaaagataatgcagatcttcaatggttaaactgttcagtaaccggatctcattgtccgtcagtcccagcgcctcacaacgccgcagatttccgctttttatttccatcaccagttctgtcagcagatgattccctgcctgtgctaattgagtcgccattacagcctcctgtattattgaaagcctgccagagtgtaagtatccactgtaacacgtaattccggtgccataactcacgggctttatttgaaagcaatacttctgcccctgctttttgtctcatggtgcgcatatattttcgccacgcccggcgccggctctgataataccgggaccatataaatcccagtaattccgcagacaattcagcctgccggcctttaccggtaaaacacacctcaatataaggttctccggcggtcccggttttccgcagtgcataacggcaacggcaaatttccgcactgaacaacaccaaccgccaccagtccgcatcctgattttccggtggacggacagaaaaccggaaaaccttatcatgctcatatttccggctcccggcccggaataaccggcagatatccatcaggcgctgtatcacttcctgctcataaccggtctttgcccgcccccggttcaggggcagataacacgccagcgcctccggcgataaggcggtgcttttattcccattcctcttcatcattcacatccggatcaacatctctttgtttggcatacaaacaacgcaacaagtacatcagtttcatccatgtcataaactgggtatcattcaataccggcgacataccgggctgatatccccccgtcagcagggctctgagggcatccggaatatcatcatgggactcatcaggttctgagaaaaccgtcatcacacgccccagcaccgaatgtgctgacaacgtaataaatcccggagaatgcaccccggaagccgccataaaggcggaagataaatccagctcattccctaattcaaacaaagtacggtaaatttgcgtctgaagatgttcaatatcatccagatgtgatgccaccggccagagatcctgacacgtcagtgccgtcaccgcatgaccggagacgggcgcctccaccggtgtgacatgctccgggttattcgtgacaaacagacttccgccatcgacaggctcaatatccgcctcgtcggtatccccgctcagcacaggtgccccgccgtataaatccgtctggatctccacaaccggacgggattttttcttttcaacgacaggagatactgaagcctcctgacctgaaccagaagataggggctccgttaacaaatcctctgccgaaaaaccggaggtcataccggtaggtacggtttctgaatgcgcggttgttgtatcaccctcactctccaccggcgcaggcaattccggctttgtgctgcgtctgcctttattgaccttcaattcaaatacccaacgttcataatccacaccggcaacagaacactccctcagtagccggccaatcagttcatccagaaacacgtcataatcaaaaacatcatggttatctatttctgtgcatgtcctttcaaaacatcccagaaaatcacaggctggatccggcccgtcatactgaaaaagaaacgaatccgctacccgttttaatgtcgaacgcacggacaataattgctcaatttggggtcttcccagcccgttttccagtaaacggggcatataaggtaataaaacagaaacagtatcttccatcttactgatgtgtgaaatgctgacaggtaatccgtccgccgtcatgcgctgagcgaatgcccggagtgataattttttccccagcgtttcctcatacagagaacgcgccacacaaatcccttgtgctttttccagaaacgttaactcccctctgacttcattctccgccagatggccaatcaaacactgcaaacgccccggccagggtttaaataacacatgaaggcggaagaaacgctcatcctgtgtctcctgccacaactcagagaggatctgatagcgcgtatttccgccgtcactgaagatataaaactcactccccggtgctttggtgactttagggacactgtccagtccgcgtgcccgaatggaactcttgatttcctcataacgcgggtttctgccctgacgtgggttatccggatttggctgaagttgctcaagtgttaatatcatcggcatttcagacaccggattgacgtgggcattatcggataacggggaactgacaggatttcctctgagaagcgcctgactgagtttatgctgtaaatctgttttcattcttcgcctctcccttaaaaataatatccctgaggaaaatcactgaaccgggtatacatcccgttaaactgcactttcaccgtccccagcggtccctgtcgttgcttaccgatgataatttctgccacacctttgtccggtgagtgttcgtgatacacctcatcgcggtacaaaaataaaatcaaatccgcatcctgttccagcgagccggaatcccgtaaatccccgtttgtcgggcgcttatctgcacgttgctccagttgccggtttagctgggaaagggccaccaccggacacccgagttctttcgccagtgctttcagactacgggaaatttcactgatttcctgcgtccggttttcctgttcaggactgcgcatcagttgaaggtaatccacaataatcagtcccggcgtacccactttacggcggtaacgccgtgcccgggcacgtaacagggaaggtgtcatattactggtatcatcaatcaccagacgctccccccattcggcaatctgtgacatggcaccaccaagacactcccagtcattttcttccagagacgcactgcggatagccgtcagtgagacattgcccaaatcactgagtaagcgctgcatgatttgttccgccggcatttccagactgaaaaaaaagaccggtttttctgccagacgcagggcattctgtgcaacggtcagcgccagtgccgttttccccatcgatggccgtgcgcccagtaacaccaaatcgcctgcctgcaaaccacaggttttttcatccagctcactgaaccccgttggcgtaccggttatcccttttgcacttaatgcctcctccagatgctgaacaacattatttaaaatatcgagcaacgacggggaataagcgggcagccctttttctgacagctgaaacagccgctgttcagcctgctcacataacgccggtatatttgcctgagccgccacactctgggtggccagcagattcccgagcatcatcagaccacgggcacggctgcgatccacgacaatctccgcatagcggacaatattggccgcactgggggtgtttttggataattccgccagataagcaaagccccccacccgctcaagcacgccgtctttttccagtacatcactgagggtgattaaatctatcgggctgtttatctgacacagggcggccattttcttccagatttcctgatgcgctctggaacaaaaatcctccgcctgtaataacggcgccacttcatcccagcggtcattatccagcatcagcccgcccagcacgctctgctccgcctccggtgagtacagagtttcaggtaatacagcagaagaagactttttatgcattgaaaagccctccgttaatccgaaatgccctgttcccaccgtgtaaataaattattttttttggaatatgaattgttggtgtcggacgaacagtcgtcagagataagctccctgtgactgcccgactattttcggaccggtaagtttggcgaccccggtctgaacgtacaggcagcctatttttatccataacacacctaaaggaacatttatgaatacaaactatcaactgccgtccgacattgattacattggcatttttgacaacaacaccgatacgggcgaagcccgttttgacttgtatgtcaaaaccttccggagtatgaccatgaaaatgactgaagaaagcaattcccgccagagtctgttccgcctgcaatggctgggtgactggctggctgaaatgtatggctggaaaatgctgaatcccgatatcactcccctgaatgctattcacagctatcttattcttcgcgataacctgccggcagctcaggtggcaggcatgacaacagaacagatacatctggcgctgactgaagagtggggcacattcaaagctcgtagaggggcaaaagactttttgcgcagagtcgaaaaacgcccggactctcttgacgatcctttccgggaaatacattaattctgatcgggctggcagtatctgctgccagtccacggttagactgaacgggaaaaaacaggagaataccttgatattcatggacgcacctcccgtttcagcacatcatcaaaacgggttttccattccggaaacagctctgaaacaagatgatgcataatgactgcggctgccggtgttttacgctgagtccggtattccagacgatgcaccggttgtccctgtgcatgaccatttttaaatatttccagtttgggaacagcggttttcagtaacgaaagagaaatcgactccgcaaaggggtacgctttttggtcaataatctgagttaattcagtcagtgttgcacgatctaacaccgtatcttcaacacaattagcaagaatacgtattgccggcaggggaattccgtaagccgtcagcggcaccagcccgccgattaatcccagtgttccccgtaaaaattcacgcgtatccggcaaaataggtttgattatcccgacagcataatcggtggcagctaacaaaatggtttccagcatcaccgaagccgcgccttttgaatcaatgataataacatcgtaagaagcgaataacggatgttgcagaatattacgcagacgcattctgccgtcaggtgcatgcaatatagccgcagggagacgatcatgcggatcgttagaaatgatgatatccagattagggataacggagcgtgatatgatggtatccggccgggaaagatcggtcagttgcattaacaactcaaacaagccgtttggtgcttcatattcaagtttaaacagactgctggctgtcggctgggaatgatcgccgtcgatcaacagggtttttaaccctgcatcagcacaaaaacccgcaatattgctggctttggttgactttccggctccgccttttgttgatataattggaacaattctggtcattttctcactcagcatactctgggtgagaagtcaaaaaaaataattacattagtgaattacatcaagctttttaactaggggattgaaaatccccgtgtccttggttcgattccgagtccgggcaccatattttatttgttcgtcagtgagttaagtcactgagagggcaaaaaagagttgaaaaataatataatttggcacagtcactttatgttaaaactcttaaactaaacagtcttgctcatatcaaggctgtttttttatttgtcacttttactttctttcctaattgctgtcaaatctagatactcctcctgttattcttatcacatcaattccgcttcaagtatatctcgcaagttatcaacactttcatcaatgtattctaatatcgatgtaatactggcatgccctaatagccttttcacaacatgcagattacgctctggtgattgcatcataagataaaaatagcgacatattcctctaccaactccctgaagcacccccaccaccactcgaaccaccgccgccaccgctagaagaactagaagagctggatgaacttgatgaacttgatgaataagacgaactcgaataaccaccagagcctgaataaccactacgtctacgaatacgttttgaatatggcagttgattaaacggtgaaccaaacggactagcgacacaaatcgctttccattcttttcgttgttgccgataaattggaaataacaggttgataataccaaataaaaccactaatacgataaaattacataataatgacaatatgactattatcactaaaacaaaattatcaataataccatcaagaaagacttgtgtataaaacatcgccgccgcaaaacagagtgtcatggggaaaaataacgttgaaaatgtaggaaaatagtacgaatattgcagataatttttcaactgtttacgttgctttatacttaacttacctttttggtctgctggatttttcttttttcttcctctaggcgctaataattgattaattttggtttttatttttcgcgtcgagaatatcaactgaaaccaataaacaccgcctaatattaccaaataaattaggataaaatgtgtgtggaatattttaagtgtattagtatttatctgtgagttagtgaaacttattggttcatgattaacggcttgaatagcatttttaaccccttgttcgatgcctgcataataattatttgaacgaaaaaatggcaacatttcattgcgaataattcgtcctgccagtacatcagttaatgctccctcatagccatacccgacttcaaaacgaacattacgatcattaattgccaccacgagcaataatccattatctttcccttttctgcctatcttccattgattaaaaacacgaaaagcaaaggattcgatggtttctttccctgtcgttggaacgatatagacaacaaattgtgatccatcattacgactattttcgaagttaaccaataaagtatttaacgctttgaattgttgtgcagtcaataaatttgcactatcaatcactctatctgtttttagttgaggaatatcattcgctgatgcactcactatcacgctaaagctaaataagaacaatgagaataagaataaaaccttacgtatcatgaggcaaagtccaccactggtgttacttttatttcctgttcactctcaacagtgaaattgacttttttatcatatcccataacgatagctatgaagttataaggaaactgtctaatctgagtattataatgacgaactgcctcgatatatcgccctctagcaacagagatacgattttcggctccctctaattgcaccattagatcttgatataatgtgttagctttcaagtcaggatatctttctgaaatagctaaaagacgtgataaagattttcccaaatcatcctgtgctttttgataactggtagcaagtgtagaattttcaaataaacgcgtattgacattaatttgtccaacagacgctcttgcctttacaacatcttgtaatacttggctttcataatttgagtaccctttaactgtattgactagattagggatcaaatctaaacgacgttgatattgatttaataattctgatgccgccgcagtaactaactcgtcattcttctggattttattataagaattaatcaatacaacaaaaataatgataagaagcaaaaccaaaccaacgactaacttacgcataaaatatccttttattggtgagcttttagttctatgacagcaataaatttatcatttttatcaactaaaaaaaatcatttaatattattacccattttttattatggttactatttttagtcgatcttttcttcagtatttttcaacaatactcctatcttcttaatgaaatagaatattcactcaatatatttattttttgcacaacaaaataattattaccttaagataaggtattgccatcagagtaaaatcacttttatcttttttaaagaatgatctgattttctaatacagaagaattaatactatctcattgctatctcagtcatttatcttaactaccaatgaacataaaaataaattaagatagacaaaatgtgttctcaaccacatgtttttgcaaccatttaacatagtattattagtattaacctaaaagagacacgctcatctcgttaatttaagagaacgctttatgaacctttttttccaaaatagcttagcctttcctagcattatctttagtgccttacttattattatcctcttttattggctatgtgctgcttttggactattagatatcgatttatttaatatcgatagcgaattagatgtcgatgcgacgggccttgcgggttggctaactaaattagggcttgccggcattccggtaaccattatattaaccttcttcactttgttcggctggtttattagttacttttgcgtacattggtttattcgttttattgaaacagatttattgcgttatgttatcggctttattgcttttattatcatcagctttgtttctcttaatttaacagcgctatgcttaaaaccaatccgcaataagctcatttctcgtagcaaacctaaatcagttcaccaactagtaggaaaatttgctgtagtacgctccgaatatgtcacagaaaataaaggtgaagccctattagaagatggtggtgccggtttaattttacagatcagagcgccagcaacagaaaatattaaacgaggggatagcgtaattattattagttatgacgcgcctactcatagttatcaagtcgtaacggaagatgaatttcaccgctaatgataaattcggtgaaaggaaaataagttaacagacacattaagattaaaaatgacgacatcgtctgaacctatggagaaaaatgtatggatttggctttcgttatgcctttcttaacaattattggctgtgtgatcttagttattttaggactctttggtttattcaaagcgttttatattaaggttccacaaggtacagcattaattgttaacgacatgacatcacaacctaaagttcattttactggggctttagtttatccggttatctacaaaaaagagtttatgcgtatttcgcttttaaccttagaagtcgatcgccgtggtaaagatggattaatttgccaagataatttacgtgcagatattactgtcgccttctacctgcgtgttaatgaaacgacggaagatgtattaaaagtcgctaaagcgattggtgtagatagagcatcagatcatcaagccgtgagtacattatttagtgctaaattctctgaagccttaaaaaccgtcggcaaacaatttgagttatcgaaattatttgaagatagacaaaatttccgtgatcgtattgttgatgtgattggtaaagatctcaatggttatgcgttagaagatgtggccatcgactatttagagcaaacacctaaatcagcccttgatccaaataatatttttgattcagaaggtattcgcaaaattaccgaaattactgcaatacataatatcgaaacgaatcaaaaagagcgtgaccaagagttagcgattcaaaagaaaaatgttgaaactcgcgaagcaagtctggctttagagcgccaacaagcagatgcagaagctcgccaacagcgtgaaattgataatatccgtgcccgtgaaagttcagaaaccttacgagtacaagaagaagagcgtctaaaagcagagcaagctcgtattcaaactcagcaagaaattgaaatacgagaagaaaaccgtatgcgtgaagtcgaagtcgcgcaacaaaaccgcaccagagcggtagctatcgagcaagagcgtgttaatcgtgcccgtgaattagaaattgtcgctcgtgagcgagaagttgaactacaacgtattgaaaaagaaaaagcgttagaagaagagcgcaaaaatatttcaaatgtgatccgcgagcgtgttgctgttgaaaaaacggtcgcacaagaagaagagcgaattaaagaagtacgtgaagtctcagaagctgagcgtatgcgccaagtgacggtgattaatgcgcaagctgaagccgaagaatctttagtacgccaagtgaaaaaagccgaagcggatgaatcaagtgcaaaacataaagctgaagaaatcagcaccatggcaaaagcagaattagaagcctctgtgaaacaagctgaagcgaaaaaacgcttagctgaagggatcgaagctgaacacgcagcattaggccttgccgaagcacgtgttcgtcaagcaactgccgaagcagaagaaaaagaaggtttagtacaagccaatatcacagcggaacagctgttggcacaagcgcgtggcttgaaagaaaaaggcttaagcgaagcgcaagtcatggaagcaaaagcacaagcgcaacaacaacaaggttttgctgaagcgaaaattcttgaagagaaattagcagctcaagctcgcggtgaagagcaacaagcgaatgctaaagaaaaactgggtcttgctgatgcgaaaattcttgaagaaaaactggccgctcaagcgcgtggtgagggtcaattaggttcagcacaagcagaagtgatccgccaacgtctgaaagcagaagctgacggtttaacagataaattcaagtcaatggatcacctcagtgatactgctcgtgctcatgaagagttccgtatgcgccttgaaaaacaatttgaacaagccatggcttctattgaagcaaataaagagattgctcgtgagcaagcggatgtattagcagcagcactgagcaaaacgaatattgaaattgtcggtggtgatggcaacttctttaataccttctctaaagcactgagcttaggtaaagcggttgatggttttatggataaaagtagctttgccaaagagaacgttgagaaattgattaatcgtactcagcaagataaaaaattagatgttgcttcactgctaaaaaatccagaagttcaagaattaattaatggatttatggcgactaaaggtgcgggtcaactgatcaaagaagtcacagcaaaatcagacaccccaaaagaagattaatatcgctctaaaaggagaggaaaagacatagataaattctctatgtcttttcgattgtttctatcgtttaagccaaggaaatccgttataccatgtctgatattcatgatacgaatcgcgaacaggaaatacttgatagcgctgttgcacaaggtggcgcatatgaaatattgcgtaaacgccttaccgagcaaggtcagcagttacatgtaaaagccactgaactcaatcagcatcgattagctgaatttggtcaaagccaaatggatatcattggccgtattcgtattcgaacagagaataattgccaagcaagagatattgttcgcgttggtgaatggttactatttggttataacgttttcctcggtttaaaacgagaaacgcatcttgaagatgttttttcactttatcgcttaattgataatgatggcgagtttgatgttgaagcggttgcttatgaaggcacttttttaaatgataatcgctttatccaagattttaccgagctatacacttactataaaaatacgcaactactacagctagttgagcgtgatggtaaattactcgctagttttcaaattggcgatcgtattaccgatgtacgcgtcttccgttggtcgatatccagtgacaaacaacgtattgaatatattgataatcgtggcgaacgcgatatagcactcccccctgcttacgattttgattggataaaaacacaacgtgaagatacggtaaatgggcgttttcctcatatcaacattttagatacagtctttgtagaaaccactggtggcgatctgactgtcaaatgtgaaaacaataccgaagatggtttaggaatttatcgtgaagcggtcttagataaaaaccagtcccttgatgatgcacaaattgaatatgcacaaactggcagtttaattttattaaaagtgcttccttaccgcgaagagaattggcgttatttagtctataacacactaacacaaagtgttcagcgtattgatgccattgggcaagcttgtgtgcaacttccggaagatcacggtatcattttccctggtggctactatctacaaaatggcgattacaaaacctttgatcaaccaatggaaggtatgtattttcgtcgtttacgtcgttcacctaacggcgaagatgtgctgtatgtcttctattcaccgacacaaggtcgtctcgcgctatttaattacaatatgattgagcgtaaattggcgacaccattggtcggtcatggctatgccatgctagaagatggcaaaatggtgctatttgaaggggaaggcgaagaagctacccgtgttcacccgatgcaagtttggcaaacgcccttctattctgaagaatttgccgataaacaaccgccacgaaacggcttttatgggcgtattggtaatgccgatttagttcgcgggatctcagaaattttacatgtcgccaaagaaattgaaggtagccaagtttccatcgctcgttatgagcaacttagccaacaaccaaaaagcttattagatctctattactggtttaatgatgaacactgtctaggtattggccccttactaaaagagatcgctcaaacaagtgaattagtgcttgatgaatatgaaaaagtcgaaagtattcgtcaacaatcagcgaaatcaatgcaagaagcgatcaaccgtcagaaatctctgttatcactgacactgcctgatagttggaccgatattcaacaatttgttgatagtttaaattcgctcaatacacaccatggacaccttatttctttgcgtgaattccgttatatggatttaacgcaattaaataaaatggaaacggaaataaccgaggcacagcaacgtgtttcgcaagccacagcccaatttcttgccagcgacaaagcgctacagccttttaaaacacagcttactacttttgaacaacagatagaaaaagcacaaaacagtgctcagcttgatgtaccaatgaatgagatggcgcagatgtcagaagatttagacatgctgtcaaatctgatggcatcacttacctttgaggatgtgacgcaacaaacacagattattgatgccatctcccaaatttatgcacaactcaatcaatcacgagctcgcttacagcaaaaaagaaaatcacaaagtagcgtagaaaccgtcgctcaatttggtgcgcaattccgcctatttagtcaggggatcaccaatgctttatcactggcaacagatccggaacgttgtgaagagcagctttcacgactgctagtacagctagaagaattagaaagccaatttagtcagcatgatgaatttcttgatgatatcttgtcaaaacgtgaagagttattagagacttttgaggcgcataaacaatcgttacttgatgatcgtcaacgtcgttcacaaagcttattaactgctgctaatcgtctcttagaaaatctgcaacgtagaacaactcggttgcaatcacaagatgaattaaatgctttttttgcctctgatcctttagcattaaaaacacgtgaaatcattgaaaaactaagagaaatcaatgacaacgttaaagcagatgatattgatgcccgtcttaaatcgtctcgtgatcaagccatccgtatcttacgtgataaaacggatatctttgaagagggtggcaatgttattaaattgggccctcatcaccgttttagtgttaatacacaagagctagatcttactattttaccgaaagaagataagctttggttatatctaaccggtaccgatttccaagagccaatcgaccatccagagcttgaaacactgcgcccttactggaatgcgacattaagttcagaatctgaaacggtgtatcgtgcggaatatctcgcctattcaattatctatgctgcatcaaaacgtcaagatggattaaccctagaaatcttaaaagaagcactgagtgtacctgaaaaattagaaaagttagtacgtgatttcgcaacacctcgctataaagaaggctatgaaaaagggatccacgatcatgatgctatcgccattctaaagaaacttctacctgtaggtgaaagtgctgatctgcttcgttataacccaacagcacgggcaattgctgctattttctgggaaaaagtacaaactaatgaatacccagcattatggccagagcgcgcacgaacggcagtgaatattcaacaactgtttcataatgatgatgcattaattgatttacaggcagaaatagaagcggatatccgcctattccttactgataatccgattaaatgtggatcttatgttccgatccaagccgctgaatatttaagttttgcactagcaagaacaccaatagaattggtttacagtaaatatgccaaagagctcgttgttgccttacaaaaccgattagaagccgctcatatgtggattgattttaatcgttcacaacaaaatttagcctcacgttatgcacaacgttgggcattgatccaaaattggctacaaggattgtgctctcaagccgattatgctcatctaaccccttatattccgggggcaattgccattattatgttagataaaatcgcctctgcacgttatagcgaggttgatttatactttaaggtaaacggattattaggtgagcatcctactattgaaaatcaaacactttcattgagtttagatgattatttcagtcgtatgcgcggacagcgtaaaacctttattcccgcctttaatcattatctgactttacgacaaaaaattgttcttgaagagcgtcagcgtttaaaactggatgagtttaaagcaaaacctctcagttcatttgtgcgtaataaactaattaacgatgtctatttgccaattattggtgacaatatggcaaaacagattggtgcattaggtgaagggaaacgcactgacttgatgggattattattaatgatctccccaccaggttacggtaaaacgaccttaatggaatatgtagccgatcgtttgggactgatctttatgaaaataaatggccctgctttaggtcataatgttttgtcattagatcccgaacaagcgccaaacgcaacagcaaaacaagagctagaaaaactcaatcttgcccttgagatgggcaataatgtgatgttgtatgtcgatgatattcagcatacacaccctgaattcctacaaaaatttatctcgctatgtgatggcacacgccgtattgaaggggtttggaaagggaaaacccgaacctatgatatgcgtggtaaaaaattctgtgtggtgatggccggtaacccttataccgagtctggtgaactatttaagatccccgatatgttagctaaccgtgctgatatctataatcttggtgaggtattaggaggaatggatgacgcctttgcactcagttatattgaaaatagcttaacctctaactcagttcttgctccccttgctttacgtgatctaaacgatctctatctttttgttgataaagccatgggtaaatcagtttcaaccaattccctcagttatccttattcggatgcggaaattaatgaaattgtgatggtattaaaacatctaattactttgcgtgatgtgattttaaaagtaaatcaacaatatatagcaagtgcggcacaatccgataaatatcgtactgagcctgcattccgcttacaaggcagttatcgcaatatgaacaaattaagcgaaaaagtctctgcggttatgaatgagaaagaaattgaacgcttactcgacgatcactatcttggcgaagcccaattactcacaacgggtgctgaagagaacttattaaaactggcggaaatacgtggcacattaaccgaacaagatgctattcgttggcagcaaatcaaaaaagattttatgcgcaacaaagcattaggtggcgataatgctgatattggcgatcgcgtagtgtcacagttggcgaatttagtagaaagtgtgcagagtttacgctaaaagagataaattaaccttatttagttcacttattttagtgggctaaatagggtatagataatggtttataaattgagcaacccactccaaaaatcattgattaattgaaatactacaacccatgtacaatccttactaacaatctttctcatgtttccatgttcacgatatgcatctgttcaagattagtgaacaagggaatatcgtgaacagaatatggttaaatattttacaattaaagggattttttaccacgtcgcataggcatcgttgatgtctgctttaacgttaatcccttcgtttctggtgcaaacagtactgataccatcatcccaaacagagaaatagccgcccccaccagcattgtggtattgatcccataagtggcaataaaagcgggaagcgcacaggtggaaataaccgtcccaatacggcttatcgacataataacccccaccgccgatgctcggatatcggttggaaataattcattcggataaagccactgtaaaatgccaggtcctcccgagaaaaaagcgtaggtagcaaacgctaagataacgaataaaatcggtaaattcgggaatatccccagcgtgaataatgctaaagtcatcatcgcaaaactaccaattaacagtgggcgccgccccgtttggtttaaccaaaacatcgcaggaatacaacccaacataaaaaataggctgatcacgacattgcctaatgccgcacttcttcctgtatcccatcctaataaaccgacaatttgagggccaaaggtataaatggcaaacatcgggatcacttggcaggtccaaattacggcaacaaagagcacaaatgagaagtggcgtttattaaataattcgataaaacgggtcgttttagcatcttctgcttcaaagaccacaggctcgccaaagagtttgatcatcatttcattacactctttaatacgcccttggcgtattaaccaaagcggtgattcagggagatcaaagcgaccaattagaataataacgcaaggaataaaagcactgcctaacatccaacgccagccatcttggacatcatataaaagataacccactaaattggcacatgtcgcaccgatataccacatagcagcaataaatccaacggcaaaggcacgttgctttttattggaaaattcggtgatcatcgaagttgcaataggatagtcagcgccaatcacaatcccaataaggaagcgcatcactaacaaccctattggtgttgaaacaaacatggtcgcaatagaaatcaccgcaatagccacaatatcaacgaggaacattttacggcgccctactttgtcacaaatatagccaaaaagtgaggtaccaataaaaagccctgctaatgttgccgcaccaagcaaaccaatccatcgcgtatcaagctgtaatataggtgttaattgttcgagcgccacaccaataatgactaatacataaccatcaagaaaagggccgccacttccccataacatcactcgacgatgtactgaggtaaaacgaatatcatcaaagtttctgggctgcatgactgcgtcctagtctatttttttaaccaaagaaagaaaagctcccaggccggagacagcgctgggagaaaagtagcgatacatcatccgtaacgatattccacgccaaacgttccgcgtgggtattcccatttttcaagcgcactgtctaaaccgagaattcgacaggttccacactctaagcaccctgcataatcaaagctgacgctaccatcttgttgttttttataaagacccgcaggacaagcttttaccagtgtgtctaatacttgcatatcaggttgctgtttaatgatgatatgtggattttcttcatcgacattaaatttattgatgcccaatttgacatcgacatttacaggagaactcatattgcttttactcctttgatcccatcttttattaaattcatccaccccacttttttgctatgacgcatgatggttttacgcatcggtacaggggcatcatcggtgacagtaaagagatcttttgcaataccaaccaccatgtcaggataagcagtaaacatacgcggattatctagtaaatcaggcatacgttgatatgctttcatatcgcgcaaaggcccctgtgctaaatggtcgagatactcattaagagtttgtttactaaaatcattttttgccattgctgaaagcaccgtttttgcagcagcttcccctgatgccatggctaaatccatccctctaatggtaaagcctagattcatacacatgcctgccgcatctcctgctatcaaaacaccatcgcgaacaagttcgtgttgcattcgcaaacctgcctcgggtaccacatgggcgctatattccaccatttttccatcagcaattagcggtgctacaacgggatgttgtttaaaatcttctagcatttgtggaaccgattttttggcatctttaatatggtgaagcccacagacaagccccaaagaaagcgtcgttttattggtatataaaaaaccgccccccattaacccatcggtaggagagccggcaaataaccaagctacaccttcgttatcttttaggttaaaacgatctttaatgacactttcaggcagttcaatgatctcttttacgcccacggcaacattttcagctgcaactcgtttagtcatgcctaactgttcagccaaaagtgagttcacaccatcagccaaaatcaccgctttggcttctaatacatcaccatctgcttctacaccgacaattttaccgtcacgctcaactaacttatcaacacgaatgcccgtgatacactgggcgcctgcatcttcggcttgcgccattagccattgatcaaattcaccacgtaatacagaccaagaggcatgattagggttatgcgtttcaacgttttgatagtcgatagtcatagcccctgtttgtgtcataaatgacagtttttcatgggtgatcacccgctcaaccggagcctgttgcgcaaattcaggaatgatgcgctcaagggtatgggcatatagacgaccacccgttacattttttccgccggcgtagttccctctttctattagcaatacctgcgcaccttctctggctaaaacaagtgcagccacagagcccgctaatcctgcgccaacaataatggcatcgaaaatatcttcggaatcggacataacatctccagaacttgcaaataaagcagagaagttatcttctctgctgactaaatcagttagatagttgacgggtaagtgcaggcaaaatcttcattaaatcaccgacaatgccatagtcagcaaattggaagataggtgcatttttatctttgttgatcgccataatggtttgtgatccatttgcaccaaccatatgttggatttgccctgaaatacctaccgccaaatacagatctggcttaagcatcaagttagaaatgccaacataacgctcatgctccatccatttttcattttcagccacagggcgagagcaggcgatttcagccccaatctcttttgctaactcttctgcaatagcaatattttctttactgccaatacctcgaccaacactgaccacaaaacgggctttatccagatcgacggcattgatttttcttggctgaattgactggcaaataatgctttgtgaaggggcaatccatgctactttttgtgccgtacccgtagcctgtgtttctgatgcaacgtcaaaagcaccagtacttgcggtaacaacacaataaggtgttgttaatgtttcatcactaaaggcaagtccaccgtaaaccatatgttttgccactaatgtatcattttgagtacttaatgattgtgcatcatttgatactaccgcggctaaacggtgacctaaacgagcggcaaataatttgccacgacgcgtattcggcagtaagaccaagccggcatcgctatgtgatttaatggtttcaacgatactttgtgcataatcttccataatgcgatcatcaggtttaccttctaattggaaaaccgctgtcgcccctaatttaaaggcagcgatgctttgctcatcattaaaggtaaagacattgattgattgacctaatgaagaagccccccccattaattctggtaaaggagaaagtacatcactcaacacccaaacagttgaaaactggctcataactccccctattacttaataatttttcgtaaatattctgcaaattcagcaatttgatcatcgccatcaccttcaataatgatgcgctgacgtactttttgtttcggtgctaacacggtttgctctgaacgtggcgttatgggctctaaaccaagatcggccacactccattgttgaaccggctttttagcggcacctaaaatggctttcatggatggaatttgcggagagttgatatcggtagaaacggcaatcaccgcaggtaaggtgatagtaagcgtttcaatttcgttttctaattcgcgttcaacggtgatggaatcagttgtaatagaaacaattttattaaccccattaatggcaggaatattcaagatctcccccaccagcaaactcacttgttgggaacttagatctgccgagccatcaccacataagataagatcgtacccctgcttagttgcagctgctgcaagcactgtcgccgtttgataaggaagagaagcttccaattgctcatcgaccaccaccacgagatcatcagcaccacgagataacacatctttacgtgctttagcgttagtcagcgcgttaccacctacgctcattgccgtgatttgaataccatcaagttgtgtttttaactgatttgccgcttcaatcgcatttaaatcatattggctaattttgttattggcgcgcgaaaaatcgagtgaaccatcggcattattgaccacaatatcctgttcatcgggaacactcttgtaacatgtaataatcttcattacatctcctgaaattaataaatatgtcatttactctggcaatgtaatatacaattaacacaattaaatgattaagaaattaaatctagatcaccaatattgaagattattaaataagagatggatagcgttcaatattgctaaatacatcaccaatattgaaattaaatttaattaaagtgattaactttcaatattgttatctggatcaacaatattgaacataataagaaatgagctatttaatattcaatattgccacaaagatcaacaatattgaaagagcgaatataacacatttattacaaacctaaatatatccttatttatcaattaattaaaatgaaaataaaaggttataaaccgtaacataaaatcgacaaaaagaatagtgtgaagtgaataacagaatgaaacattaataatacccattattcttcttcattaatgattttataaattagccaatcggcttgttttttgattatgataaaaaccaattaatggaatatataggatctaactaatagagtttattcgaaattaggaattaacacttattaaacttctgcgctaaatatatttggaaaatttacctatgagcaaagataataaaaaggcaggaatagaaccgaaggttttttttccgccattaatcattgttggtattttatgctggttaacggtacgcgatcttgatgcttcaaatgaagtgatcaatgccgttttcagctatgttaccaatgtctggggttgggccttcgaatggtatatggtgatcatgttcgggggctggttctggttggtttttggacgttatgccaaaaaacgccttggcgatgagaaaccagaatttagtacggcaagctggatctttatgatgtttgcttcttgtacatcagcagctgtgctgttttggggctcaattgaaatatactactacatttcaagtcctcctttcggtatggaaggttactccgcaccagccaaagagatagggttagcttacagcttattccactggggcccgctaccttgggcaacctatagtttcctgtctgtcgccttcgcttacttcttttttgtgcgcaaaatggaagtgatccgcccaagtagcactttaacgccattagtgggtgaaaaacacgttaatggtttatttggtactgtcgtcgacaatttctatttggtcgccttgatcctagcaatgggcaccagccttgggcttgcaacgcctttggtaactgaatgtattcaatacttatttggtattcctcacactctacaattagatgccattattatctcttgctggatcttactcaacgctatttgcgtggcatttggtctacaaaaaggggtaaaaatcgccagtgatgtgcgtacttacctgagcttcttaatgttaggttgggtatttatcgtgggtggtgccagctttattgtcaattacttcacagattctgtgggtacattgctgatgtatatgccacgtatgttgttttacaccgatcctattggtaaagggggttttcctcaagcttggactgtcttctattgggcttggtgggttatttacgccattcaaatgagtatcttcttagcgcgtatttctaaaggtcgtactgttcgtgaattatgtttaggaatggtatcaggtttaaccgcaggaacttggctgatttggactattctggggggtaacactttacaactgattgaccaaaatatccttaatattccgcaactgattgatcaatatggtgtgccacgcgccattatcgaaacatgggccgctttacccctcagtacagcaaccatgtggggcttctttattctctgctttatcgccaccgtcactttaatcaatgcctgctcttacacactagcaatgtcaacttgtcgctccatgaaagaaggggctgaaccaccattattggtacgcatcggctggtctgtattagtcggtattatcggcattattttactagcattaggcggcttaaaaccgatccaaaccgccattattgccggaggatgcccactatttttcgtcaatatcatggtcaccttgtcctttataaaagatgccaaagtgcactggaaagattgctctccctatacgcaaaaaatgacacattaagaggttattaacatggattttagattgaatgatgagcaggaactgtttgttgacggtgtccgcgaattaatggccagtgaaaactgggaagcttatttcgcacagtgtgatcgcgaaagtaaatacccagagcgttttgttaaggccttagcggatatggaaattgacaatctgcttatccctgaagagcacggtggcttaaatgccggatttgttactgttgccgcaatttggatggaattaggtcgtttaggtgcgccaacctatgtgctctatcaattaccggggggatttaacaccgtattgcgtgaagggactcaagaacaaatcgacaaaatcatggcgtttcgtggtacaggcaaacagatgtggaactcagcgatcactgaaccgggggccggttctgatgtgggcagcttacaaaccacttatacccgtaaaaatggcaaagtttacctcaacggtagcaaatgctttatcaccagtagtgcttataccccttatatcgtcgtgatgagtcgtgatgcggcttcccctgataaacccatctttaccgaatggtttgtcgatatgagtaaacccggcattaaagtcactaagctagaaaaactgggtttacgtatggatagctgctgtgaaatcaccttcgacaacgttgaacttgaagaaaaagatatgtttggtcgcgaaggtaacggctttaaccgtgtgaaagaagagtttgatcatgagcgtttcttagtggcactgactaactatggtaccgccatgtgtgcgtttgaagatgcggcgcgctacgccaaccaacgggttcaatttggtgagactatcggtcgtttccaacttattcaagaaaaattcgcccatatggcgatcaaactcaattcaatgcgcaacatgttatatgaaactgcatggaaaagtgacaatggcttaattacctccggtgatgctgcaatgtgtaaatacttctgtgcgaatgcagcctttgaagtggttgatagtgcgatgcaagtgctgggtggtgtggggatcgcaggtgaacaccgtattgcacgtttttggcgtgatctacgcgttgaccgtgtatctggtggctctgatgaaatgcagatcctgacattaggacgcgctgtactgaaacagtatcgttaattaatcgcagagcactctcttaacatcaagtgagggagtgttcaaacagtccactgacgaggtgacattatgacagaacatttacccatgccacaatttgggccactagctggagttcgtgtggtgttttcaggtattgagattgccgggccatttgcaggacagatgtttgcagagtggggtgcggaggtcatttggattgaaaacgttgcatgggcggataccattcgtgttcaaccccattatccacagctttcccgtcgcaatctacatgcgttatcgttaaatattttcaaagaagaaggccgtgatgctttcctaaaattaatggaaaccacggatatttttatcgaagccagcaaaggtcctgcctttgcccgtcgcggtattaccgatgaggttttatgggagcataaccctaaattggttatcgcgcacttatccggctttggtcaatatggcgatccgcaatataccaaccttccagcctacaacactattgctcaagcatttagtggttatctcattcaaaacggcgataaagaccaacctatgcccgcctttccttataccgctgactatttctctggtatgacggcaaccacctcagcattagcggcactgtacaaagtgcaacaaacgggcaaaggggaaagtattgatattgcaatgtatgaagtgatgttgcgaatggggcaatacttcatgatggactattttaatggcggagaaatctgtccacgaatgaccaaaggcaaagatccatactatgccggctgtggcttataccgttgccaagatggttatatcgtgatggaagtggtcggcatcactcaaattgaagaaatttttaaagatattggtcttgctcatctattaggtactcctgaagtccccaaagggacacaactgatccaccgtattaattgccctcatggtcaactctttgaagataaattagatgagtggctagccaaccagcctattaccgccgtactaaaacgcctatctgaactcaatattgccagtgcaaaagtgttaaccattcctgaattagaaggcaatccacaatacgtggctcgagagtcaattactcaatggaaaacgatgagtggtgaaacctgtaagggaccaaatatcatgccgaaattcaaaaataatccaggaaaaatctggcgtggtatgcctgctcacggcatggataccaatgcgattttgaaaaatatcggttatagcgacgaacaaattagggagctagtcgataaagggctagctaaaatcgtagagtaaataccgttagactcaggtacaagtggcactatcccacaatacctgagcttacggcaaaagcatgggataacagtttaatggatgtgattggcagacaacacttacggcaaatgtgggatgatttagctgaagtttatgataaaaaaacagcgctaatttttgaatctgcacaagggaaagtcagacaatttagctacagtgaattaaatgaagagatcaacagagccgcaaatctttttcatgcctgtggtataaaaaaaggcgaccatgttgccttacatcttgataactgcccagaatttttcttttgctggtttggactggcaaaaattggcgctgttatggtgcctattaatgcccgctttatgtatgaagagagtgcttggatcattaaccattgccaagcacactttgtggtaacaagtgataatttctctccaatttaccaaccgatgttgcacgataagcactctcctttaacgcaactgtttttaataacagaaaactgtctccctactgaacaaggggttgttgattttttaagtgaaaaagccaagcatcccgttacgcttaatcatcacaccccattaagtgtggatgacactgctgaaatcctttttacctcaggaactacttcacaacccaaaggagtagttattacgcattataatttacgttttgctggctactactcctcatggcagaacgccttacgggaagatgatatctatcttaccgtcatgcctgcttttcatatcgattgtcagtgtaccgcatcacttcctgctttttctgtcggtgccacatttgtactactagaaaaatacagtgcaagagccttctggaagcaaattctcaaataccaagcaacggtaacagaatgcatacccatgatgatgcgcaccttaatggcacaaccagtctcaccagatgaaaagcaacataaactgcgcgaagtgatgttttacctcaatcttgcagatgaggagaaagatgcctttattgaacgctttaatgtgcgattactcacctcttacggcatgacagaaaccattgttggcttaatcggtgacagaccgggcgataaacgccgttggccatctattggtagaccgggattttgttatcaagcgcaaattcgcgacaaacaaaatcagcaagttcctaacggtgtagtcggtgagatctgcgtcaaaggtgaaccgggaaaaaccttatttaaagagtattacaatcgccccgatgcaacagaaaaagcgctagagcctgatggctggttacacacgggtgactatggttatcaagatgacgaaggctttttctattttgttgatcgcagttgcaacatgatcaaacgcggtggtgaaaacgtctcttgtattgaaattgaaaatatcatcgcatcacatcctaaaatccaagatgtagcagtaattggtgtacctgatgatattcgcgatgaagccattaaagcctttgtggtactggttgacggtgaaacgttaagtgaagaagcctttttcgccttttgtgaacagaatatggcgaaatttaaagtgccttccgccgttgagtttaaacaggggttaccacgtaattgctcgggcaaagtgatcaaaaagcatttgcaataagccataagtgggttttcgtgacagttaattataactgcttatttttattgaaaaaggaatatgacatgagccaatcattacatctaacaacacgtggttcagtgcttgaaattatattagatagaccgaaagccaatgcaattgatgccaaaaccagtcatgaaatgggtgaggtatttatgcgttttcgtgatgatcctagtttacgcgttgccattattacaggtgctggtgaacgattcttttgtgccggttgggatttgaaagccgcagctgaaggagaagcccctgatgcagactttggtgctggtggctttgcgggcttaacggaattatttgatcttaataaacctgtcattgctgccattaacggctatgcttttgggggtggctttgaattagcactggcagccgacatgataatttgttcagacaatgcttcttttgccttgccagaagcacaattaggtattgttcctgacagtggcggtgttttacgtttacctaaacgcttacctcctgcaattgtcaatgaaatgctcatgactggccgtcgtatgaatgcacaagaggcgctacgctggggcattgctaaccgcgttgtcagtgcgactgaactgatggatagcgcccgtgaattagccgatcaaatcgccaacagtgcgccacttgcagtcgctgcattaaaagagatctaccgtgccactagcgagctttcgattgaagaaggctacaaattaatgcgcagtggtgttctaaaatattacccacgtgttttacattcagaagatgcactcgaaggcccgctagcctttgccgaaaaacgctcacctgaatggaaaggacggtaattatcacttgaattgataatacaactaagaggaaaactgatgagtatctatgcatttgaaggtgttattcctgttgttcatccaacagcttacattcacccatcagcagtactaattggcgatgtcattattggtgctggtgtttatattggccctttggcttcattacggggtgattatggccgtttaattgttgaagcaggtgcaaatcttcaagatggctgtgttatgcatggttatacggatatggataccattgtgcaagaaaatggtcatattggtcatggtgctattcttcacagttgtattatcggtcgtgatagcctagtcggcatgaatagcgtgattatggatggtgcgatcattggtgaggaaagtattgttgctgccatgagctttgtgaaagcgggctttcaaggtcaggcgagacaaatgttaatgggaagcccagcaaaacatgtacgtgatattagcgaccaagatatgcaatggaaacgtatgaacactcgtgaatatcaagatctcactgttcgttatcgtcaaagcttagttgaaaccacaccattaacagcccctgaagctaatcgtcctcgtttaagaggcacgacagaagtaaaacccaaaggccaataaaccaacagcgacaggcacaacaaacgcctgtcgtattgctttattttaacactcggctatcaattaacgccgttgtgattttgacaacatccattgccatttttgttggtgatccagcccatgagggatcatagcggctaatttctctggggcgcttaaacgacttttactttgcgtatgaccttttaaacgagcgtaaagagcaggatcaatatgactgactttgatcatcctttggcattggcaccctcttccttccaattgattaggaacgcttttggtatcacactcaatctcttttacatcagaaagaatataagaaacgatattaatcgcattacattgggggatatcaaaatttttagcgatctcttttgcgctcacccagcgttgctgctcttgaacccagtctgcaattaacaagtagagtggtttatttatgtcttcttcacacatatttactccaataatattacaaataaaagtttatttatctctaaataaagataataactatatgttaattttatttaaccgcggagtatcggctttccctgttaattcattcagttagttatttaaaaataaataatattttgtatatcattaacaaccaaactctttaattaacacattaattacaatttattttgttgttattaaatataaaataacactaataaaaataaataaaatcaacttactgagtttacagtaagaacggacaaaaagaataaaggaacatgataaaagtgtttataaacaacaaaatagcataaaaatattatattattaatccattaaaatgctaaggttatagtaatagatttatttttagattaccagaaaggcaacttattattagatataaatcaataagtgactaaattacgccttatccgcgtacatgataatttggtagagaataatcttactttaaaaccataagtcgatataataaattattatcaagcaatttaatcagacaatatttctacaatatagtacaacattcagcattctattcttttaaaacactctattttatcaatagcgattttatttaatatagacagaaaaattgaataagaataatatttattttacctatgattattattttattggcgccattaacattaaatggcgccaaataacaaacacaataaaatcattacaatgattggcgattaaaggctaatgaccaatcatcagtaaatttattaatcgcatcatcgactacgggtgaacggataatagagtaggcaagctctatcggaagtgttactgccgaagcgccagacaacagacaatcaaccacttggcgtggtgttttaaaactagctgccagtattttagtgggtaaattatgcatggaaatcagcgtttgcaactctcttactactctcacaccatcagagccttgtctatccatacgatgcacataaggagcgatataatcagcccctgctagcgccgccatcaacccttgagacacactgtaaatagcagtccccaataccaacatatttttttgctttaattgtttaatagcaaccaagccagcttcagtgacgggaattttaatcacagtattatcggcaatattaccaatgcgcaatgcttcttcaatcatggtatcgatatcacgggcaatcacctgcgcaaatatccgccctttgccacccatagcggcttttaattcaggtaataacgtttcaatgggctgcactgattgagcaataatagaaggattggtagtgacaccagcaataggaagcacttgtgaaagttttctcacttcttcaatatctgcggtatctaaatagatttccataatcgcgcctcaatgatgttggttttaagctaaataattataggtatagattagaaagtagcattgtgagcgaaggatttccagtcagtttaatgaaaatagcgccattttcacggcgctaacaattaaacaaaaataaccgttatatttatttaattcttatcattaatataattttttgttattaatcctagccaaaatcttaatagtgttaagattaacagtatgacaaaaataattatttaaataaaatatagcgagttattttttaaattcagcatcaataacttgataaaaagcattacccgtatcagcaatatcccaaacacctaaaataatttgataaccagaacgctctggtatattacaatttaatgttacggtttctgtgggtattttcccattatcatttcgttggcagaaaggtgttaaatcaaaatcagcacgggtcaatggtttattaacatcccacccgggtttagtaataaagaagcgccatgattcagtgctatgttttgcagttaatgtccacttaaaagtattttcgccacttttcattgccactttatgccagcgatctgcactttgtgcatttaaagcagaaaaagttgcctttccaccactggcaatttcaccatctgctgggccacctttagggaaccctttatccccttcaatggattgcggttcatactgtatcggaccacaatttttatttaaattctccccttcggatgaacaaagaaaagctctgctgggtgggatatcaatatagccatgctttaatgtcacctcagctgatgctgttgaaataatacctgcagatgataataataatgttgcagtaaatagcataagtttatttttcttcataataaatcctcaataataattaaattttttaaaatataatgattatgtcaatcacattagatattagtcaaaaatagataattaaatatatatttattaaaatctgtgagcaatatcgtcatttaatttaatattaaaaggagactaaaacagtcatttaatatttattagatgatgattaactattgaaataataaaaatataaacaagagtatataaaataagtttattattaaagaatagttttaaattaacatttcacttaaattaactattctttataaaaattagtttgatgataaatatgccatggcacttcgttaatcaattaaaataacgcattgatataatcagaagtaaaccctcgatattggagatagcggatctgtttcgctctttctttaaaatctttgggtttacctgtaccaaattttttctctttaagatcttggcagagtgcataccaatcagtttctgtttcttctagtacccgtgcaataatttcactgggaaagcctttttgccgtaactcttggcgaatacgcagcgggccataagatttacttaaataacgacgaaaaaaagcatataccgtgcgattatcatccagatattggccttctaataatcgctcgatcacttgctctaagcatctttcatcggttgtgctctgtttagctttatcgacttcgttgatccttcgtgctaaacggcgtttcagctcagtggtaccataatcacgacgcgacaacataaatatagcgtattggtataattcatcataagtcatcgcaactccttaatgttattgcaccccagtttggtatcctgcatatcttatcgcagttacttatcaatgcgaccaattaatcggaacttatcaatagctgtacaaaaatagtacaatcacgcttggtaaaccccgttatttatcaccataaaatcatctgcttttattaagaataactgaagataaagatgattattagttaaaaacacttagataataccgtgataatacatattgctaagcatttttatctgcaattagcacttatagctggtgaccatatataagaaaaagactaaaatttcgcgctactcttttacttactatttggttattttttatttttgtgggttatatatgaacttttctcattttaataaggtagtgtttgctgcctctcttcttgctactggcttttcttatgcggatagcgatcgccctctgctctctttaagtgtaagccaatctggcggcactgcgttaaatagcgaaggttcgttagatacccgtactcctgcaagccaatcgcgcgtattacctatttggggtgatgaagctcgcgcccgaggttatgatttaccagagccatttggagtaagctataactatatgaatctacgtcaagatgtgattgtggataaaattggatttaactctagcaatattgctatgcaaggtatattggatcaattaattattgatgttggccatactcgcagtagtaataaatcacatatggtgaaactcgatagttgggttttcccatttatgaatgtgtatggaatctatggaaagacaaaaggcacatcaacagcacaattgaaatctgttggcttcaatattgatgctcctatggctaaaaatgttccttttaatttagattatgaaggaaaatcttatggtgcaggttttactttagcaggtggttataatcaattttttggtactttcgatttaaactataccaaaactaatcttgatattctcgatggggatattaaagccttagtcattacaccccgtgtaggttacgagtttatttttcaacctctaatcaccggtcaaggtaataccaagctgcaagtgtggacaggggctatgtatcaagatataactcagcgatttaaaggcgatgtgaataaattaaacctgcctggtgagatagcacaaccatggatgaaaccttttatgaatggaatgaaattcgatgttgaacaacatcttgcccataaatggaataatttgattggtgctcgtttagaaatcacccgtaactttaatatcatcactgaagtgggatttaataatcgtaatagttttctgttctctggtgagttccgtttttaatggttaaaacatcttttatttatgggctggcctttgccagcctatttatttcacacacagcgaatgcccaactctttcctgatagacaacaaatcgaccaatggttaaatcaactaggagggagcaataattttgatcgcagtaaaaccatcgactggggcgttttacccgggcctttctatacccctgaattagagttggggcttgggatcgccgttgttgggctttatcaagcagatagtcgtcccgacagtaaaatttcatcactgtcattaagtggctttggttcatcaaccggggcttttggtatgacttttagtaactatacttaccttgctgatgatacatggcgcttttaccttactggggcattaaataatgtgccgaccaacttttggggacaaggctatcatgaaggacgagttaaaaagaactttgcacaatatcgttcacaagagctacatttaacgccgacattgctacgtcaaattaccaaaaacacctatattggcttaggttgggattacgctaacttacaagcagcagcacctgatgatgagtttaaagcctatatgagcaaacgtcatttgccattacgctctaccagttcaggattaagtgtgcgctttacctacgacagtcgcgattttttgcctaacgctcgccaaggccaagcctttgatattagctatactcattattcatcggataccggtagtaataaccgttttaatgcaacccaaatgcagtacaactattattatccattaaccgaagatgcggtactcgcctttgatagctatgctcgctttacctcaggagatgtaccatggacgcaactgtctaaattaagcaacggccatcagatgcgtggctattatgaagggcgttatcaagataatcatgttttttctagtcagatagagtatcggcaaaaacttagttggcgtcatggtattgcattatgggccggaggtggcacattgagtaatcaagcacgtgatctcggtaaaggacattggctacccagtgttggtattggttatcgttttgaatttaaaccacgcatgaatgtacgcctcgattttggtgtcggtaaagagagcaccggattttatttccaagtgggtgaggcattttgatgttaacgcgtttggctatttttaatatcatcttcatattgatcatttcaggatgcactacctcatctgtgtctgaaaccattgccgctcatctggaaagtgaaactcaagaagaagcctcacaagtttggcaaacgccccccgcacttgatgcacctaatggattaaggccttgctgtgcttttggctataatttaaaagtcaaagcatggggaatacctattcctttttatcgtatcgataatattgttgaagcatctactttaggtgatcatcgctataacgataacttttggctgggaactgccgcagtattaggcataggcagtgaaaagtcgggcatagtctattcacataaagggggctttcttgatatcgcccatattcgtgataccgcagattatacttattatctctttagccatatctatcccaaattaggccaagagtggacgctaacactcagtgacgaattagcacagcgtaaaattcactttaaccgctttactcctcctagtagtgatcgacaacgttataccttaagtgcttatcttgccgcgcgtttagcttatcgccttgccgtatggcatgagattgcacagtggtacggttatcgctctgtagcgggattttcagaagggatctccgcattctcaccagaagatctctactctaacctaatgggggcgcgcttatcacttaccctgatcctcaatggtgatgccacaaaccttgagcactataaccaatcaatgcagcgtattattccctcagcactcgctcaactagaggcgcaacctcgtcaggccacccagcagtggtttgatttaattgatggtcaatggtggaatagccaagagcgggtacccgataaatttttagtattaaagcgtgattatcatcttgctgacaaacgctatccggtattgccttttggggagacaactccacctcattatctgacattacccgatgtttacgcaggctattctttaaaacaattagcagaatttcagctttggcctactaaacagatggcaaatttacccatccctaaaacatattggaaagaagcggattttgctgatttagcagaaaaagctcgccaaatcgatcaaaaaactcgaccaaaaacaacaaaaaatgactaaatattgaacaaaattgacatattaaaaacgctaaattatgataaatttgagttaaatagcattaatttatataagaataactgaacaataatcaaaaatcacattttttgttaaaagaaaaaagcgattataaaacgaggtgttccagtaaataagatacattttattaacaatgcactcgtagttatcctaatgtaaggcgatattttgtagctatagaaaaagtaatttgctagtattcgttcgatttttatccagttaaacgaggagaagcaatgccctctcaattgatgaggacaagtgccgtcttcgctttcttgatttcactactctttactggtgtgagttttgcctctaccagtaccggcagttcccgaatgctgcaggcggatacattcaaaagcacgacaacctcgttgccagatttgaaaaaatatccctcgggaactcagcgtaagaaagcgtttttaaatgtcatagttcctattattgataacattaataataagatattgagagatcgtgagtggttaaccgctcaacgtaaagcccaacactggggcagcgcagatttgaaaaaactgcgtgaaatctgtcaatactatggcgtaacatgtaccagccccaaaaaagtgaattgggattcgttactggctcgcgttgatattattccgactcattttgtcgcaacgcaagccgcaacagaatcaggttggggaacatcaaaattggcacagcaaaacaataacttattcggtatgcgatgtggtaaccggtcttgcaataatgtccctgggaaaaccaaaggctatgcagcctacccggatattgaaggctcagtgattgcttatatgcgtaatctcaatacgcaccgcgcctataattcactgcgctcatcaagagcacagcaaagaatgacgcaacagcaactcgatccacgccagttaatcaccgacttgaaaggctattcagaattaggttcaagttacaatgattatctgaccgaaatgttcgactcaaataagaagctgatcacgcaagttcagttacagtcgaaacgagaaagttagtcctaaatagctattcatagcaaacaaaagccacttttcatttatctgaaaagtggcttttatttatcacaagataatcttttgattgaaagcaagctaataattcataatatagggagtaacacatttggtatgactgttaaatcacacccttagagccatttatgaattttttttcattcgagtttctcggagcctttacgagcttttttattatctattggctcttccaaaagcaggttaagatccaaaatatcttactcatcatagtaagttatgcttttctattctatgtcgactaccgtcctgctgttatcttattaagctatacgcttttgatttactcattagccaatatactcacccgctatacctcaacgaaagtgatttattggttactggggctgttagttgccctctattttactgcctttaaatattactcatttttccaagaatcattgacacaactattctcacagtggggattaagtgttgaattaccaattattgaactactggcaccattagggttatcgttttatatcttccactctgttagctatgtcgtttcagtgtgtcgcaaagagatccctaaagccccttttcttgatgtcgtgctctacttatgctttttcccaagcattgtggcgggaccgattaatcgtgccaaacaatttttaccacaaattcaagcaccaacccgtaaaattatcgactataaaggggctatcatgctgattgtattagcaatcgctaagctcttttggttaagtggttggttgtcgacaaattatgtcgatcctatttttaatgcccctgatttagccactagcggacaagtactggtggcgacctatgcttatgcatggcatatctattttaacttctcgggttataccaatttagtgacaggtattgcgctattactgggttttgttgtccctcgtaactttaatgcaccttatttagccatcaatcttgctgatttttggcgccgttggcatataagtttatcaacgtttattcgcgattatgtttatatccctttggggggaaatcgtaagggcgttattcgacaaaatgtgaatgcctttgccgcgatggttatctctggtttatggcatggcgcagctatgacgtttattatctggggagccattcatggtattggtgtggtgatattaaatatcaaacaccgccttttccccaccgccaaacatgacgccaatagcatgctagcatcattaaaaatgttgttatcttggataattaccttccattttgtgtgctttgcgtggatcttttttcgcagccaaaccgtcaatgatgcttggatattaattcaacaactctttagtgcaggtgcttggcagtcgctacaagccgaagggctaaccctgtttatgttctggggactgttcttactgtatccttgttttgtcactttaagggcaattattgcgcgacttgagaaaaaagtgccttggtatgtttatccactaccattagcgttgatccttacaattatatttatgttgtctcctgatggggttccgggatttatttatgccagcttttgatttcagttcaaatttaaaaaagaccgtaaaagtggctttaatggtgctcttcagcacactatttcttatttggctaaaccaaacatcattagagcgcttttggcaacaacaataccatcgcccagccccttggtcgggtttatcacaatattatgcttggcaagtgggaggtcagttgcgagatggcgtatttgtcgcagtaacaagctatagtgattatttgcgagttaatcacccggataatcaggctaaaccaataacgcctcgtcaagaacaaaccgcctttccagaaggatttgcagtagggctacattttatcaatggctatactcgccccgcttcgcaattaacacaacagtttccacaactcctacaacgtcaatatgcacaaggtacattagcaaatacatcaactattgatctgacaaaagccgctgctgaagcccaaaaacctattgtgcaaaaaacagatgtcatattatctcccaaagacaaagtgctgtttgctggagattcaatgatgcaaggcgttgcccccttattaaaacgtcaattgcaaacagattataatataagcagtattgatttgagcaaacagagcacaggattagcctatcctaagttttttaattggcctcaaactattgctaatcggttagctagcgatgattccattaagttactggttgtttttttagggcctaatgatccttgggacatgcccccagatggtggcggacgttatttaaaatttgccagtgaagcgtggggtaccttatatcgcgcacgtatcgccagcattattgataatgcgcgccaacataatgtgagtgtgatttggattggtcctccgaatatgcgtaagcaaaaattatctcaaggtatggcttatctaaatcaactttaccgggaagaagcagaaaaaacgggagaaatttacctttctgtcaatgatatgtttaaatatgaaaaagatatttattctgattatatcggtgatggtagcagccgcgtgaagctaagagcaggcgacggtattcactttagtttaaaagggcaacaaatcattgctcagcaggtattctcgcgtatccatctgcaaaaagttgatgatgtgccagatgatgtaacagacaaaaatatggtcacgccaaatgaaacaattaacgcacatccttaaacctcgaaccttagtcagtcgttctattatactggctttggtttcgctgttagtcgcttgtaaccaagagaaagataaatctcttacgctatcaacacctagcgtgttacctgcagatggttcaagacaactctacaactaccacgatcccaactttgccgcttttgcgcaaaagttaaagcaacgacgccaaagggtacatatcgtacagttgggtgattcacataccgctgcggattttttcagtggtaaactacgtgaacgttttcaagctgattatggcaatggtggtataggttttattccccctaccgctattgcgggtcaacgtattgccaatatccaatatcaaagcagtaaaaaagcgtgggatttactttctagtcgcaaagaaagcgatcctgattttcccttagggggatttatcgctgagccagtcgcgaaatggtcagcattgcaactaaatgaaaatccgacaacaggtcagcgttaccaattacaagcgttatataaggcgcctacggcttcacaaatccatttacaatccgctggcagtaaaacactttcactttcacagacacaaggtgaatggcaattttctaaacccacaacgatcaccttcccaatcaatattacgattagtaaaaaccaaccgataaaattaggcggttggttaattagcaaccaaaagccaggggtgatgttatccgcattaggtattaacggcgcaaccattaatatgatggataaatggggagcacagtggagtaaaacattaggccaattacatcccgatatggtgattttagcttatggcactaatgaagcctttaatgatacgtttgatttagtggcttaccgacaactgcttgttgaaaaaattcgtcaaatccgccagcaagccccgaatagtgccattttattaattggtccgtcggattctattaagaataaagacgcatcagattgtcgctctcagcaaccccaatggttaaccgatattattcgtatccaaaaggaagtcgctcaacaagagcgtacattattctgggattggcgcgattatatgggtggagagtgctcaattaaagcatggtctatttatgatcttgcaaggccggacggtgtccacctttctcgtgaagggtatgaaagtagtgcaaatactctctatagccaattatcagcgctgattaataaaagttagatattattataacgaaaaggagcctcagctcctttctcgttatgtggactctcagtcatcgcattattaattatgtaaagcatcaatatatttaatgacatcaacactcgcttgttccatttgctgaatatacttcactaccgcatcctgatcaccggccatattcgccgccaatgcaagacgcccactttgatgaaccaatttatgaggctcttctaaacgacgaaaagcttcactgccagcaaatttgcgtccttcaccttggtagtaccattttcctaaacgacattcagtatgctgattaacacaattttcatcatcattatttaataagtgaatataaatcgcttctttccataaaacatgatctattttcacagtattaaaaaattgttgtatcgacataaactgaaagatattttttaaatcattggcttgttgagcaagcgcagataaattagcatgaccttccgtaacaagattttttatttgcttaagttgttcttgatttttctgagtattttgttttattggtgtaaagcgggcacttacattattgttgatagacgctatttctgaggcctgattttggatcttttgtgaaaggcttttcatctcttgtgctaatacagaaaatcctgcacctgcatgacctatatgtcctgcctctattgctgaattaattgataatatattggcttgatttgacagtttatcaatattattagcgctatcttttattttatttagccatttagcaaaattctcaatttcttcattactatgagtaaaatgctcatcaatttcattaaaaaagaccactaatgattctgcattgataagcatgtcattaaagagatgttccatttcttccagcaatgctagcttttcttgtaatttctgactagatgccaaaatggaatcacgaataagtgtaatagtatgaatattacactccgtatgctgtttaaacagtgaattataatcacccataaaaatatcagcctcaccatgttcacaaaacaataagacctgtagattaatcagttgttaactattttctatcagatttaatggtgatttatagcaatgaaaaatggcgcacctattgatgcgccatttgttaaaaaggaacagctcatttttataaaaatgcaaagaaaatcattccaaccactgcgcctgtagtacctaaaatggtttccattaatgaccatgtttttaaggtttgcccttctgtcgcaccagtaaatttaccgtataaccagaagccggagtcattaacatggcttaaaataatagagccaccggcaatacaaaccgataacgccgccatttgtgcaccgctataacctaattcactgatcaccggtaacactaaaccaaccgcagttaaacaagccacagtcgcagagccttgaataacacgtacagcacctgcaagaataaaacaagccacagcaatcggcatacctgcaccaattaatgcattccctaatgctggccccacacctgaatccaccagcacctgtttaaatacgccaccagcacccgtgactaataagatgatccccgcaggttggatagccgcagagcatacttccatgactttttctttgctcataccacggcgaatagccaagccataaatagccactaaacacgccacaaggatggcaataaaggggtgaccaataaactcaagaatattgaatagctgagagtcaggctcaacaaaacgcgcaccaatggttttacatccaaccaagactaatggcaataagaccaatgcaagactgaagccaaaagaaggcattttactttgtcctaagcttggctcatcaaaatctttcggtaattctaaggtcacataacggctaataaagttaccaaaaataggccccgctaataacatacctggaatagctgcacataaaccaattaagatcatccaaccaaaatcagcattcatctggtcagcaagcaacataggcgttggccccggtaataagaaggcagcggcccctgcaacaccggcaaagagagggatcgccattttaacaacatttccccccgtacgacgggcaacagcaaataccaccccgatcagtaaaaccaccgcaacatcgaaaaacagaggtaatgcgcaaactaaacccgcaatacccagtgcatagttagcccgtttttcaccaaaggatttcagtagccgtaccgcaatttggtctaatgcccccgtttcatgcagaattttaccaaacattgcccccaaggcgaccacgatggagagaaaacccagagttccccccattccgttttgcatggtttgcgtgattttttctaacggcataccagagaaaatgccagcaccaatagcaacaatcattaacgcaataaaggcgtgtaaacgcgcatacattacaaagaagagcaataataggacggagccaaccgcagttagcaccagtgttaatgtactcataccgcactctcctcagtaataggtttagtaacagattctatagtgttgatgacattttcaatcacgttatcaagagatggcgaaatatctatttcataaacatcaggttcgtcattcgttggctcttctaatgtttcaaattgagtaatcaacatctgtggtttaaagaagtgacctttacgctcttttaaacgactttcaattagcgcgtaatccccttttaaatagagaaaatgtaagcagtgattaccttctcttaacatatcgcgatactgtttttttaatgcggaacaaacgattaatgacactttattggttctttgcattgcaaaagcagcatcattgagagcgtgtaaccaaggtttgcgatcttcatcatttaaagcatgacctgaagccattttagtgatgtttgcacgaggatgaaggaaatcgccatctaaaaatgccgcaccgatacgttgtgctacaccatttgcaaccgctgatttaccgctgcctgatacccccattaagataaagacatggtgtagggattgggtatctttcatatattgctcctttaggcagttattaacttttttgtaatgttacccgtaactgttacgggtaacattactcgatccagaaagataaaaacaacctacaaaacaaactatgaaatgaaagtgtgaagcgtctcgcaaatagattgtggaaaaacaacaaagttacaacaaaatcataagtaattgataagttaacgactgatttttacaaagcaaaaaaacgtcaggatatatcactctataatcccaaatagggtcaataaaaaaaccctaccaaagaaaaaaataatttaataatcaaataaataactaaatactttcaccggtgatgatacggaatcccacatcaatcacttgcccacgagcaattttacccttcattctttttagtaataaatccgccgcttgttgtcccatttcatcacgtggcgtaaaaatactggctaaccgtggagtcatgacttgtcccacatcatgaccgtggaaaccggaaatagcaatttgctcaggtaccgcaatccccatacgctgacattcgaaaatagcccctatcgcaatatcatcattggtgcaatagagcccatctaagtcaggatattgcttgcgtgcctcatgtaaaagttctgtacctaacgaataagaagagcttttaggtgtcatcacatgacctatgggtaagcctgcttcttgcatcgcttgttcatatccttgtaaacgcattaatgttcgctcatcttgtcttgccccaagatagataattcgtttacaaccacggtggatcatttcgctgaccatttttcgcgaggcttcaatattatctaaccctaccgccgaatcaaaacaaggtgaaacactatccataatttccaccaccggaatacccgccgtttccagcattttgaccgttttgggtgtgtgtgttctttccgctaagatcaagccatcaatattataagaaagcagagaaataagacgctcttcttctttttctgcttgatagccatagtgcgccaacatagtttgataaccatatttatccgtcacagattcaataccacgaataacttgtgcaaacacttggttagtaagagaaggcaataatacgccaatcgcatggctggtcgcattcgacaaaatatcaggtgcacgattaggaatataattcaggctgtctaattcacgagcgattttgactcgtaatgcttcggaaacttgttctggattacgcaaaaaacgactaactgtcatttttgtgacaccaacacggtcggcaacatcctgtaatgaggggcgtttttttttcattttatatcgtaactatccaaaatatcagtattaatacgcacttgaggtttatttaacaaacctgattatatccttaggttatacactatttcgaataaagtttatcggatgtcttcttagatttaattttgaatgcctctcccttgacttaagccaaaggaaatatagtatgcatcgttatataatttatgaaataacgattattaatataaaacaacactacagtgtgaacctatggctatccacagacgacaatttctgagttatttaacgacgcttgcagcattatcagcactgccacgttgtgcaagagcggcaatcacttcacgtatcgctgctcaatttggtgtgcttcctacaccagaaaatattcatcgcgttattagcgcaggcccaccaaccgaccaactgttgttggctttagtaccagaaaaattattaggtttctcctcgcttaatctaggaaaaagtagcttatttgccgacaagttgcgtaaattgccccatttaggccgtctgtctggccgtggtagtacactctccttagaaacattaatggcgctagagccagatatcattattgatagtggtaatgttgatgaaacctatcgttcattagctaaacgtgttagtgcgcaaacagatgtaccttatgtgttaattgacggcagcttaaaagacagcccaactcagttacgccaaacgggggctttattaggtgtggcagaaaaagcagaaacattagcacttattgcagagcagtatcttagtgatgcgaccttgtttgcttctactctaaaaataagacctcggttttaccttgcacgtggtgcgaaaggcctacaaactggctcaacaggatctattcatactgaagctattgaactattagggttcgaaaatgtcgctgatattgcaggttttactggccttactgatgtttcccctgaacaactccttatgtggaaccctgaagttatcatcacacaagatgaaaatgcctatcagcaaatcaggcaagactctatatggaaaaatatccaagctgttaaaaataataaagtgttattatttaaaggcttaccatttggctggttagatggccctcctggtatcaaccgtttaatgggaatgcgtcgcttacagagccattttgaccatcgaatagcagaacaagccacgcaagatctgcaaaattactttgcttgtttttaccatacatcgttaagtgctgagcaatgccagctgttgatgaggtcttcatgagccaatcagcacgtatcactctgttgttgctgttattctcagtggctgtagttattgctatcactagtggtaagtattcacttacagtcaatgaactgtggacagtcgtcagtagcaaattaaccgggcatattgaagagagtcgaacagcaaccgtgttctggcaaatacgcttgcctcgagtgcttgctgccattttaattggaggtgggcttgctattgcgggggcggcttatcaaggtatgttccgtaacccactagtatcacctgatattctcggagtgtcatcaggggctggtgtcggtgctgtattgggtatttttcttggtcactccatgttgtcaattcagctttttgcttttgtcggagggcttatcactgttgctttagtctattttattgccaaattggcgaaacaacaggatccggtcctttctcttgttttagttggtattgcgattagcgccttatgtggctcagctatttcattaatgaaaattttagctgatccttatactcagctaccttccatcactttttggctgttaggagggctatcaactatcacggcgcctgatttactctctgttgcacctttaatgctactcgggtttattccactgattttattacgctggcgaatgaatattctcagcctttctgatgaagaagcgcgctccttaggccttaatgtagaaattaccagacttatctttattttatcggccacattaatcaccgcgagtgcagtttctattgcgggcattattggctggttaggtttaattgttccgcatatcgcaagattgttagttggtgctaacttcggatatcaactgcctatttccttacttgtgggcgcaacaatgttattaataacggatacactagcacgaactattgcgaatattgagttgcctttaggcattttaacctcggctattggtgcgcctttctttctgatgttattactcaaaacaaggcgggatagatgatcatcactgcagctaaacaactcacaattggctataaaacaacacccttgatccaaaacctctctttttatattaaacaagggcaaattgtctgtttattaggcgcaaatggctgtggtaaaaccacgttgatgcgtaccttacttggtttgttacccagtcttgcaggccatattatcattgaaggcaaagaaataagtaagtggtcaccaactgatttagccaaagtgattgcctatgttcctcaagcaacccacctccctttttcttttaaagtgattgatatggtgattatggggcgtggagcacatatctcttttttctcgatgcctagctcacaagataaagcaatggcaatggaaaccttagaaatgctttctctttcgcatcttgctcaccgcacttttgatacgttaagtggtggtgaaaaacagttggtattgattgcacgggctttggtgcaacaacctaaattactgattatggatgaacctgctgccagccttgattttggtaaccaaatcaagctaattaaccaaattaagacactaaaagccttgggtataagtgtgtttatgtctacacatcatccacaacatgccgctttactggcagatgaggtgattttactcacccctcatcgccacgttttacaagataaacctgagcttttgctcacccccgaacatttagctcagctttataatgtgaaacccactgatattcaggcgcacttttacgcctaccctgataataacaatccatataggcaagaatatgaacaccattgaaaccacagattttgctgagctttataaaaaccatatgcaacaggcacaaagaaccaaaaaagagcctgaacattgggataaacgcgctgaaaaaatggcagaaaactgtgcgaatcccaacgatccctatttgatcaagtttcgtgaaatgatggatttttccgatgctgaaacactattggatgtcggctgtggacctggctctattagtattcatgttgctgacaagtttaaaaaaataatcgggatagattatagtaccggcatgctaactgttgccaaacgtagagccgcacaagcgggtattcatcatgctaattttcttcattattcatgggaagataattgggatgcgcttccaccttgtgatattgcggtggcttcacgctccacattggtgatggatttaaaagctgcgctgttaaaactaaatcgccaagctaaattacgggtttataccactcacaccgtatcacccacttttgttgatcaacgtattcttcgcttattaggtcgcaatgttcccacattgccgacctatatttacgcagtcaatatccttaaccaaatggggatccaccctaaagtagattatatccgtagccgtaattgccaaaataattttaatagccttgagcagtttattgacagtattaacttctctgtagggcctttaaacgaaaatgaaattgcacacttaaccacttattatcatgaaagtatgaaaaatgatgtggcccttatatcgccaacgcgtgattgggcgatggtttcttgggatgtcgttcctgaaagcgagctaaccttatgatttattatcccgatgcttttcttgataatttattgctggaagatattcaatatggcgatttgacttgtcgcgcactcaatattaaccatcaattaggcacaataacttttacatgtcgtgaagccggctgcgtcagtggaatcaccctaggctgccgtttattagcaaaattaggactgactgtcaccgcacatctacaagagggtgattttgccaagcaaggtgattgtttaattagtgcagaaggtcaagcagatgcactacaccaaggctggaaagtggtgcaaaacgtgctggagtggagttgtggtgtgagtgactatatggcaaaaatgctcgaaatctatcatcgctaccaacctaaagggcaaattgcctgtacacgtaaaaatatccctaatacaaaattactggccactcaagcggtacttgcgggtggtggtattattcatcgccaaggctgttctgaaactattttactctttgctaaccatcgccattttttatccgagccagataattggttacaacaggttacacagttacgccaagcagcacctgaaaaatgcattgttgtggaagcagataacttacaacaagcaagagaagcgttaaaagcgcagcctgatatcttacaactggataaattctctattgaagatattaccttactacaacaagaggctccgcagattgccccacgctgtcatctttctgtcgctgggggaattaatctaaatactattgaaaaatatgcccaaacagggatcggcttaatggtgacatcagcaccttattacgcaccacctagtgatatcaaagttcgcctttaccctaaaaattaaatcaaaacacagataaaaatattagtttattgactgataaagatgagtgcctacattaggtaagcactcactttgtaactttaacttgcgcctatcgttatataaacaattatatattgagattaaaataatgaaactaacacctctatgctgtttattccttgttctactgccttgcagtgtaatagcccagacaacttaccagcaatcaatccctgatgtattaaccgtttggagcagtcccattgcggcaaatcccgatgtattaacacaacaacaaatgctcgaacaaaataaagtcaatgcggcacaagcactggcaacattacctggtattgtgatgcaaaaatcaggtaatcgtaacgaatatacccttaaagtacgtggttttgatagtcgccaagttccggtgttctttgacggtattccaacctatgtgccttatgatggcaatctcgacttagcgcgttttaccactaacgatctcgccagtatcgaagttaacaaaggttatacctcattactgcaaggccctaatctgatgggaggtgcaattaatatcaccaccgcaacgcctcgcaaaccattagaaggtcatattgcttattcgcaaggttttgctcgtggtgctgattatgctcataacatgagtgctcgtttaggagcacgtactgaatatggttttatccaaattagtggcagtcaactccagcaacgttttacccccatacctaatgcagatgaaaataataacgcagttgggacacatggacgtcgtagtcattcagcaacagatgataaacgaggaatgatcaaagtgggttggacaccacgcgcttctgacgaatataccctcacctatgtaaaacaagatggtaataaaaatagtccaccgaatagtgatcctaatgccaaaggtcgatataaatattgggcatggccagattataataaagagagttactactatagtggtgtgacacaacttacggatagcataaatctacaaagtcgtgcttatcatgataagtttgaaaataccctttatatgtatcctaaaaaaggtaatagggtcgattatagccattatgatgatcacagcacaggcgctgcattacaattcggtatcgatatggaggaaagtgatctgctctcttttgcggtacattggaaagatgacgttcaccgtgcccaaaaagaaaaaaacggtgattgggtacgttttaaagatagaacttggtcattagccacagaatatcaatgggtagtgagtaacgatcttgatgtcgttggcgccataagttacgactggcgcaaaagtatcgatacagataaaaaggctgataacaacaaacaaaatgccattaactgggaaatcatggctaaatattcattagccaatgacgataatatacgttttacaatctctgatcgcagtcgcttccctacccaaaaagagcgctataccaccgaaaaacccaaagatggatcaagagggattattaaccccaatttagatccagaacgcgcattatcctttgatatgacctacgaaggttatctcaatgagaaatggggctaccaaactagcctatattacaatcgtgtaagtgatgccattatggcgcatacgctttatcgtcacggtgaagcgctatttcaaaaccaaaacagtggacgtgttgattatctaggcttggatattggtactaaagggaaaatgaccgattggctagaacttggcctaaattatagctatatccatagtgatccaaagcaagttgaccatattgaaggtttaccaaaacataaagcctatatgtggttaacctttattcctgttgaacaagtgcgctttactattatagaagaagcacaaagttggacttataaccgtatagatgagaataataaactggctggctatacaaaaaccgatctacggttagattatgatgttggatatggtatttcagttaatgcttccattaataatctttttgataaatcttatcaatatacacaaggttatatagaagatggccgtaattattggttaggcgctgaatataaattctaatcagctcactcaattataagtaaaagcgctattaaaaaataatagcgcttatttttcaatattcataaatccatattatatgcaaaaaataatctattaataaaatatcagaaacgtaaaaatccttttgccatttctaataaagtgttcattgtactactgacaatcttaacaaaattatcataattactatttgctgtactgtattttttggaaagttcatctaaattagtgttaattttcttatctaatgcgtcgatggtttttctgaataactcaaattctgtttgattaatatcatccgtgttagataccttcttagatagatcatttagcaatttttctaggtcagtacaatcaattctacctcgacaatcaatgtcaacatcaggctcccccccacgcctttgtattgatacacttattccatttataccttttaatagtttttctaacgcatctgcagcattatttacctgttgtagatcgctataatgaacttcttggccatcaatggtgcgtaaatatgtcccatccttttgatgttgaaaaaacaaacgagatttaaaaacaaaaggatcgtcgacagtacctgttggatttttatatttatctctaatgttagataagtcattaaaaaaagatttaaaatcaaaattcaccgtaccttctttacttcctgctttctgatatttatttaaattagatatggtttgccttagttcattgacaaaattcatgtagttagaaaagatatcctttaatacatctagataatccgctttgcctgaaacaatagattgtttaacattattaaaaagatcacttaacgaatcagtctcataactattatctttttttctaagatcatttagatcattagaaaattgatttaaaaaatcatttttatcattaatggttttattataatcatcatctaaataataatatttatctgtatcaggtaacttctctataaatttattctttctattattatcataattcatatcttgatattcccgattaggttcccaagataaaaaatcctcatcttctagcaggttttcgaaataattatcagtatttactctagtatttaaatgaggtaaatcgttaatcccctcagtataaactgaaatatcattagacataatcttaaccttttatattaaataaaagtttataaaaaaaatatgattttatcttttaaattaagctcttacatttgaagaaatcgtagaagctgcatcctgctgagcatgaattatcgcttctattgcttgtaataatgctcttataacttcagtcacttctcgctgtatctcattgttattattaatcacattattattaatacttcctctcgcatccaatactttttgttcaccttcaattgtgctattttcagattgtatagtttggtctgcaacccttgctaatggatctgccaaagatgaaatagtatttcccatcactatggttggattggaatgcccaataagctctttccccatccctttaatagaaaaagtggctcccataccatgtatagccatagaaattccagcactagtaattgcagaaccaatcataatattggcttttttattaagattatcttttactttatcggctatatccaattcaatgttcattagcatcacacccatttctctggatgcttcaaatttttttatcattgtttctaaatatttaacaatgagatctattaatttcatcatatcgtctgaaacaaagttaaaaatccccgttctttctactttaacatgatcgtaaatatcattatcattatctacttctaatgaatctaatatctgtttaagatctggtttagttatatgctctggttcagataaaacaggctttagattaactctgtctattcctgttaatttacttaagctaggtgctacctctttatataacttatttctatcaataataccctcaccttcatcagcattattgattgtagtttgatagtgattagatacattatcactattaatcttcatactcatatttatacctcactaattttttatttaaatagatatatttcttatcatgtctgattttaatttattacttactgaagatttatcgctgaggttttttaaaatatctgttatagaatcaatattctcatgataagtttccattatcttatccattaatttttgaataatatctaaaaccgcagttaattttttactaccggcaatagactggattatttttgacgcgataacagaaccataaatattaacagtatttgttgctgctgaattggttaacttagaagcaaccaccgttctattcaacataatacttgcttttttagaaatctctttagctaactgcttatcaattttttccagtgcttcttcaagcgctttaataatgatatctttgatcattttccccaataccgcttcaagtccatcattgagcactttttttagtatttgtctaatttgctgattcgatattttattaaccgcatctgaaatacctttcatggcaggtccaataacaaaactcaatgccgtagcggcaacaaataaaacgactgtgacaagtattttagttgccattttcaatttgtcttgtattgaatttttcatctcttcgatgatttttttatctagccctaattctttgagtccatccaaagaactattaactaaactcactagaaaatcactaaccttatcgatagcttccataaccgcatctgatatgggttgcataatctcatccataaaagatttattatgaatagattgatacacttcatcagcaatagttaacccagcatcagcaacaaataaggttgttgcgactcctattaataccattgaagagccagcggtaaaaatagaagaaacacctgcaacaagcgttaataatccgcctaatatttttaaaccaataccagcccaaaactgaatttcttcttgttttttgattaatgatttttgctcttcaactttatctttaagtgatttttcagtcacctcttgcatttcattaaaaagtttctgttcactttccgaacgatgtaacatgacctttaacgtcaactcacgtgtcttagataacagaaatgtcagtaatgacataccggataaagagttagatgcaatttcaagctccaaggaactttgtgaaatagtcagttctttaaatagacctcttatttctgctaattgtttttttattgattcactttcttttttgttgatcaatgcctttaattcatcagtatgtgaagtaattttattgattttatcttcacttaaagaaatatttggtaggtaattaaaagaatcatcaaaaaaaccatccaattttttagataaattatctagttcatctaatgaaagcttagaaaaatcactaggaaagtttaagaaagggaaaacatcttcaagggctttttccatatccactttagagtgaatatttcctaataataactgttgaattaatgaatcaggaatattgcaattatttaaaaaacttttaacttcagactcttttttgaaattcttttcttttatttggttataaacttccatccagtaatcaacaaaagcacctttggttttatcaaggtcattgaagccagatttaaaaagttcttttaaatcatctatgccattagatagcttttgtaatttatctctgtaataatcaaatttctctggatctttaattttattcaaaatatcttcatgtataacatgctggtaagataattgtaaaaataaaaaatcataatctttgttggattttttattttctaaatgatcgggactggaagtaggtaatgatgaattttgttgtgcagatacgtcaagatgatcatctttttttttattattcttcggttcttcttctgctaaggaaggcttagtattgtcttcatcattttctagtgaaaatgtcgtcattttatattgtggatcatcttgaatattaattcttttcgcattcctctcctgttcatgaggtactctaagaagtggtatatcaaacttactttgattctccttctgttgttgagtagtcacataattacttatattattaattgcatttgcttgcttagtagtatttttaataacattttttacttcttcagaaacaaaaggcgaagctaatctactatgttcattactttgattaatcttattcatactattattccttttcttccttttcttcctctttattaaggacaacaagaggaatatcttttaatagctctaaatagctattagccttctcttttatcgtttgatcattaatattttgagccacctgatgaaaacaatatttagctttttctttttcaccaattgataaattacattgtccagcataaaaaacaggtcgataatcatttttagcatttagataagctaaagcataaagatcgatagctgcttgatattgcttttttaattgattaactgcagcaagtcccataatgtaatcaacattataaaaatcatagagacataaaaacttaaaaatcgcctcagcttcatctaacttccctttctgataaaaatcatacgcaaatgaataaatcccttccataaatccatctggaatttcactttcatctttgatagatgcgccattttgtacaatagaaacaatgtagtttgcgagctgatctaattctttttctgacattttttcatatgctgacattatgataatcctttcatctatgatgaataattaataataatattctaacttaattattaattacccactttaataaaacacacgtctatattcataattataaatatttcgactaaatttattaattattgatatagtccatttcttctcgagataacccttcaatttctactctttttagccaaataagaacatccataacatctaataaatcttgatctattatcacttcaaataaatgatatttatgatgtagcttccttgctaattcaggataacgaataacgggtgtaccaacttttttggcataggcctttactgctaatgctttagcattagtacaactcaatgaaactattggcattatgccattatcaggatcgaagtagatacctaccgcgacatgtgtgggattgacaataacagctgatgagtcgcggatcacacgtttcattggctcatcgagtaattcttgatgaagttgtctacgtaccgattttatttctggatttccttccatatttttatgttcttgcttaacttcatgtttttccatcatcatatcttttatgaataaaaagaaatcagcaataatatttaaaataagaataggtatcgataaaataaaaaatataaatataaaactaacaactaatgagcaccatttatcaatcaccccctctaaatcagcgcgatatagtataacgacttcccccatatgtaaaatcatgaaaacataacaagttattaaaaatataataataaataatattgtttttaaaaaatcttttattgttcttatgctaaatatttttttaaatccagaaatggggttaatatgattaaaatcaattttaattgcttcagtggcaagtttaaaatgggagctaaatagagaagggattgcgccagataaaaaagtcacaataatgatcggtagtacaatatcaaagaataattttgatataacttcaacataactctttaaagaaatacctgttggatgcagtaaaagtgattgataaaattgattaaattcatccaacttcacttgattaaataaatatataacaccaatgaaatagactaaaccagaaaccagttccttacttttaaacgattgtcctttttttgctgaatcatcaagctttttctgtgttggcttttctgttttctcagccatgataaatactcataaaaatagaataaaagtatctactgttaaaaaaatgatataattcattcgtcattgctgaggtaaaaaagagcaataatactaaaaaagcgataatacctttgatacaaagagagagagaaaatgcatttaattgaggacaaaataatgaataaacccctaatgcaacttcacttaagaacatggtaattaatacaggagaaaccaaaataatcgccactttaaccatatcatttagccaatgaccgataaaatcgtaaccgatatttttattaatatacccaataggaaaaacatcgtaactctcttttatggtactcattaaaacaacgagcccacctgtagctaaaaaataggccatacaaaacaatccggttaatgacgcaaattctgacgattcaatacctgtagtaggattaattgtatctcctatgcttgctcctctttgattatcaacgaattctccaaacgcagaagctatccaaaatggcgtggcaagtagcaagccgataactagacctataattaactcactaattagaacaatagcccaagtctctcttaaaaccccagttatcgtgatgctaggttttattcctaatgctatataaaaaataataatatattttaataattgactattgagaactcgactattgaggaatggaataaacataaaaataggaaataatctagcaatgagcaaaaaaatatcgattaaataagattgtatatattgcaacagtactagcatgatagttaccctgctaacccaatcgtcaacatctctttagcataaattagtaacttatctcccatccatcccatcatcataagtaaacaaacaaaaacccccacaagcttgacaccaaaaggtaaagtttgctcttgtatctgtgtgatcgtttgcaatagcccaataagcaatccaataaaggtcgcgatagcaataggcgcagctgaaagcaatataatcaaataaatagctttattagccgcataaaccatatccactagttcaccgccatcaaatcaagatattgattaatgagtcccttagataacagtccccaaccatccatagcgataaataaaataagttttaaaggtacagataatgtaatagggctcatcatcatcatacctaatgctaataaaatgcatgagacaactaagtcaataacaataaaaggcaaataaagatagaaacctataataaaagcagattttatctcactaagtgcatatgccggtaataatgataagagtgaattttctatgttttctttatcaccatcactattcggtctattctcttgcgcttgttcaaaaaaagctaataaatcaggatctgagtaatgataaaggtattttttataatcgcctaacgcctcatttgaaaatgactcaatcgcatctggagatgacatatccactttattttcaataatatagtaacaaatgtttttagtaattggtgtcataacaaaaagagccatcattaaagcgatagcattaagtaccatattagaaggaacttgctgtacacctaatgcattacgagtcatgactaaaacgatagaaaactttaaataacaagttcctgcagcaataataaaaggagccaatgtggcaagagctaggatcaagattaattgtgttgagctttccatatgttattcacattttatagataatttattaatttctaccgctaacatatctttaattttgattaattctccttgggcaatagctttaccatttgctaaaatattaatatgacgaatggcattatcaggtaaaataaatttcttccctggtgctaattcttcaagttgatcaattgataatgttttattggctaaaagaaaagatattgtaatcggaatagcgccaattgaatttaaatcaagtgattgagctaaatcaatgctatcttctattatggcatcgttttgctcatcctcttcattttcttcactattttcaacaatagcatctaatgtcacacaattaccctcatcccatgaaaaataaaaatattttttatcaccaacattaaaagaaaaatggatatcatctattaataaaacatcccctggtaatattgtttttaataatgaaagtgatattttactgtaacctaaaataaaacttgttataaaacctattttattttttggaaatactgtcaattcatatttccatttaatatcgcaaataaaaacatgacctaatgtggtatctacacaaggatagcaagatcctttttcagcacctaaacagatattatcaacacatgatgacattggctctttagaaaaaggaaataataatgttgataaagattgtgaaaaaagagcaattaaatagttttcaggtactaattcccaatcaatttttttttcaggatataagttatccatgacttgactaactgaaattaacgccgttaaggttcctaatttattctcacatctcaatacaaaatatagctgtttttctgttattttttttgtaccaaagatagaagataatattaccatgtcattaattttatttgtttctttatggttattatctacctctacgttaatactcattcattttcatcctctctttcataaatagcattaatagagttgatataccacgatttatttttatggctattagttagatctatggataatcccccattatattgcttcaaattctctaatgctgtttgataaacgcgtcctgaggaggcaattaactgaacttgtttatcaataaaatgaattttagcctgatgataacgactcttccattttgtaaatgtataagtaatgcttggtggtagagtcaacatagatatttttttatctattacttgccaagcaggtagctgtgaaaccattttggctacttttggtaatgcaattaccgtttttattggtgtaacttgcgaagaaaaaggaacaactttattagtttcagtgatattttcttgataaatttccggttcttcttttgtatcaacttttgatacgttatttagcggcattgccatactagactcaatatttttgtatgcactgttattctctttctgatgaatttgagcctgtttttcctgcttagttgcactgctaactaaatcaacattatcattattaacgggttcttttttaattattttttctaaaaacttaatatactgttgttgatttatttttttatctacgaaaataggaaatactgaactcttttttgtcgataagaattcattaaccatcgttttaacattgttttttcttattatgtctttaatgacagttttttcttctattcctacatggggttgtagtttgtatttatctatcttagatgtttttttatttattctctgatcagtgagctgtgcttttttttcttctcttcctatatataaagagttaaatcctttttttatatttatatctaaagatatttttttagttttagaaccaccagatgataataaataccgatgacttaatagcaaaccttcataattttctggcattttatcttcctgaagatcttgctcatcgttatgactggcaatattgtcttttaaactcgctatttttttaagtatatctaatttctctgctaatttttttatactttcaggtgtaagctgacatttattcaaatacctatttacgctataagactcagttggaatatcactttccgttttttcactagatagcgtcatcttatttgagttagatattccctgaaccatataatgctatctcctgtatttcattctgctctaacctttcaatatatagctctttctctaatgcttttctttcaaaataaagtgtcattttattttgttttttgacggccttttgtcgttgtttttttagcgcctcactctgtttttctaaatcattcagtttatcctttatttcttcaacttgagcgacataaaaatttattgaatgtaaaacaatagcttgcttccttctttgttgatgaaacgaatgaattgaataaataccggctttttcataagcgggtacttcactctttaaagcactaattaattgctcttgctcttttttcttctgttcagcttctgtaataagttttttatattttaattgttctttttctatttttttttgccgttgggcaatggcactaatcaatgcttgatgcttaagcggtaatctcatacatttgttctaatgtttgttgaaaatcggctttttctttaaaggattgagtaagaaagctttctatcttggcttgttttcttaccgcgatatcatttaattcgttatctccttcatgatattctcctaactcttgcaataacttaacatcttgtaatcgcatcaatatttgtcttatttttaaagcagatttttgttgtttactatcagtgacttgttgaaaaacccgactcacactacctaatacatcaatagcaggatagtgccctgatgctgctatttttcgagataaataaatatgtccatctaaaatagaacgaatttcttcaccgatcgcatctggctcatcatcactctctaataaaacagtataaaatgccgtaatggagcctgtttttgttacccctggacgctctaaaatagcgggaagtttatcaaatacagatgctggatatcctttacgtacgggcaactcacccgctgttaatgcgatatcccttaacgctcgacaataacgagtcatagaatcaataaataaaacgacattttttccttgttgacgaaaatattcggcaaccgttgttgccactaaagccgcattacacctttctaccgctgattgttctgaagttgagcaaattaaaaccgtattttcacatcgcttatgttgctttaattcttcaataaactctgtaacttctcttcctcgttcaccaatcaagccaataacaaaaacatctgcctgtgcaaaacggataatcatattcattaacatcgttttacccgttcctgcactagcaaaaatccccattcgttgccccaatccacaacttaataatccatcaatagcacgtatacctgacttaaatagtgttgtaataggcagcctatcactaaacaaaggtggccgaccttcgataggacataaggtactaaaggtcttctctgctatttctgtattaaatcgtaataagcaattccctttactatcaatcatgctgcctaatatatgtgggcctagggcaactgaaaatgtttttcctgttggctcaactataatttgtaaagagtaaccttgagcgcttcccatcatacttaatattgctatgttattatgaaacccaataacaatagcttcaccgagaatattttcactgaaaatattctcttttagttggcagacctccccaataaaaacatcacgtaacatcacttctaaaatatttccttgtattcgtaaaggatgcgctgcgttatgaaacattagaaatctggcgttcattatttagccaataaaccgttgatgtatactattcataatttgaaaatagtcatcaatggctcttgccatgctttctccattttgcaatgcaattggcataaatgatgctcttaattctaaagagtcctcaattctcaccaaggccggttgtccagggtaaaaactttctgtttgattattgatgctatctaataataattcggcactaatttgtgtaagtaatttttcatcataatcacaaagcaccgaccaaatcataggaacctcgtcaacaaccaataaattaatatctggcatatcacctaaactaatggtaatggttgaatggttatcgattgatttcccccctgaaaataaatcattccgaccaataacattcattgcatccataagtaagctagcaagatcaaaagacataatcactcctaaatagattgtaatacattaatttcaatatcagatgttatctcatcataagataataccggtatttgaggatattgagtttctattagtttttttacaaaacgccttatatctattgatgttaaaaatatataatcctgaatatatttaatatcatcaataaccatagatattttttctattatcatatctaattcagcaggttctaaattcaataatgtgccagaagaactttgtcttattccactacgaattatctcttccatatcgttagataagataattgcattaaacttcccatcggttgaaaaaaaataactaatataacgagcaagaagcgttctaatgtgttcagtaagtagcacgggatctttttctttgctcccccattgaactaagccccctataatagtctttatgtttctaataggaattttttcttgtactaatcgttgcaaaacatcatttatcctctgaatagaaacttgcctataacactcttttaaaagctcaggggcactcttttctaatttatcaaggatatcttttgtttcttgaataccaagaaactctgtaatatttaatgtgatcagatcagagaattttctataaaagtaactttctgaacgttccgctttgtaacctaatggcgctaatttagattcatcatcacgctcaatccaataatgggttttattatcatcttcaatacttattaagttaaagcctaaagagagcaattcatcattaggattttctatatgaaaaagaggaaaaggacaattaagttcttttgctttaacttcgttaattaaaataataattttatcgtcatctattttatctgaatagtgaatcacaatatctggtaataatataccatattgtaaaataaattctttttgtaaccatttttcaaaaactatttttgttaaatatggttttttcttagtagaaagagtgatgattaatggcaaagtttcagcttgtgataaggtaatattttctgttaataaactattatctacttcttccccatgtttaccagaaaataaatttgacataagtccttttttactgtcggcattagtagcattatgattatctttttcatcttctgttttatattcttttttactactcttccattttattttaaaaaagtaaacgccaagcattacagataaaataagaaaaacaggtgtgggaaatcctggtaaaaaaccgataccaaaagccaaaatagctgtaacaagcaaagcaaaatcttgtgccaatagctcattcataatgctatagcccaaattattattttcaccaccgacacgtgttacaataaatccggcactaatagagataagtaaagcaggaatttgtgcaactaatccatcccctatcgttaaaagtgtatatgtatgtaatgcctctgtaatagataaccccatttgagccatacctaccgatatgccaccaattaagttcacgaagataatgacaatgccggctatcgcatccccttttataaatttcatggcaccatcgaatgaaccatataattgactctcttgtcctaactctttccttctgatctgaacttcttcattcgtaatgatccctgattttaaatcagcatcaatactcatttgttttccaggcataccatccaaagaaaaacgagccgcgacctccgctactcgttcagatcctttagtaatcacgagaaattgcactatggtcacaatggaaaagacaacaaaacctacaacaagattttcaccaatgacaaactcaccaaatgaggtaatgatctctcctgcatcggcatctaataatataagacggctagtgcttattgataaagcaagccggaaaagagttgttataagcaataatgcaggaaatgtcataaagttcagtatacgtttaatataaaatgaactcataaagataagaattgcaatagtaatatttaaacctataagaaagtcgaccaaataagttggcaaaggtataattaacatcattataaccagtatcatcactgatagtacgataagttctggtttgttttttattgctaatagaaacttataaatcataaactttgccaataattaattgttttttattttcttaattgatattgctctttcttaatataattatctataattttttgtatcattatttggcattcatttctaaaatcatcagataagtataataattcaggatatttattgaacattgtctttaactgttgtagcaacctcatttttattttaataaaataacctttccattgattatccataagtgatattaaatatttttccatttgttctggagatatcattccattaatagttagttgataaaaatcatcttcttttataaaactctttaaatcttctttaactaaattttctatattcatttctataaagctatataataatcgtaatttatttaccttttccaaaagataaccaaactctgaactttgggagcaacttggcattaacgatttcatatcacaaatcaagctctgtgttagaaaattcaaaataattgaacatttttttatatcatatttttctatccacattttgaaaaaataaataggttcaatatccagaataatgtaactacggtaaaggtctcttaatactgatgcatctaaacaaagtaatttagcaaaggctttagcttggagagcaatattaatgcccgccttaatttgcttaccctcctcacctgcaagtaacctattgatctcattttcaatacctgcatctaattgtgcacctaatttttttttcctaagtaattctcgtaaaaccataacgagatcactaggatcagggaacattttacgtaaatattgcaataattcctgtaaacttctccccgattttctaaattgaagcatcaccttatcaagtttctcatcagcaccatcttctgcaatatataaagcttcttgccctttattggcttttttgtctaataattttcctaatcgctgagaaaaaagagttgccaccatagacatatcatcagatatttctattaattgattttgataattttcactttcgtttatttgtggttgcttatattctatgtcttgctgactttctttactaatactgttgctggcaccatttgtcgaagttgcagtattaattggtccgatcataatatcacctcataaatgcctgaatttgttttagcgcttgagatgtttttttatccatcggtaaaaatgggtgttcagttaaagagtccaatccgtgcgtatcagttttatctaataaacgcggttgtaacataaaaatacgcaccatttttttattattatctgactgatagctaaatgctcggccaactaaaggtatagcacttaaaaaaggaattttgttttctgcttttatgttatcttctcgtgtatatccaccaattaataaactaccgccttcagaaactcgggccacggtgctgatatttgtgcgattaataacaggtaatttttcaatcccttcttctctatcttcatcatcactttttttctcggcgccatcttcaagattgataatcatctcaatctcttggttagtattactaatacgaggcaacacactgatcatagtgccgaatgttgtagattctaatgaagcaactcgctcacctttaatttgtgtataaaaggtggtgttattatcaaatatggcgggggtattttcttgagttaacaaaataggacgagaaaccattttagcttccccttcctcactgagtgctttgattttacttaaaaaactaaaaccagatacagcacttaagctagcggtattaaagaaaaatgtatttttacccgagccataactcccctgccaattcacccccaaactatcggctttacttttagaaatatcaattatccataatgacaattcaacttgtcttttcggtttatctaattgtgaaataagtgagctaactaaagctaaaccttctcgactcgttttaaccaacaggctatttgatccaggtaaaggaacgagttcaacattatatttgcccatttgagtgataatcggtgaatgagtatcttgtatatcgttggtaattttatcatcctgatatttatcattatcttcgataatctcacgcgctcttctgactgttttttctttctctcccgatggcataaatagctgttgcaaaaccgttgttatacctggtaaaaccactttttcatcacgtaatatataggttctatcttgtacaaaagtgttttttaatggaaatatctgcacaaactcatcgccataacgagagcttccggttggaacttgattattgatattttcattaattttttcttgtacatcattatccaaaagctcagcagcagccttaactaagctaatataaataggaggacctgagagataaaaagtacgctgatcgtgacctgcacgtaatgggtagcggagatcatataatccaacatcttgtagatactctttcagtttactcaagctgatatttttcacttgaaatagctgttgctgtatctcattatcgcgataaatataaatagattctccgtcattaaaataaagtaatgacaaacgttttaccattaattcaaaggcgtcttcaggtgaagaaatatcaaattttccactgatccgctctttttttactgcgctgcttagaataaaaggtttatttaatttatctgatagcactaggaaaaactgttcaatatgtgtatttaccgcaacaaaaacatcaggttttttaacctgatgtgtataaataacctttccttctgcagcttgtgttggcaaaaagaagctataaaaaatgataattccaatgatacagtaaattttattttttatgttcataaagatattggccaattcgccgaaattcagttggtgtaataccaaataatgtcttaatttcattagaaaaatgagatgctgaactaaaaccattatcgactgcaatctgagtcaatgattcatctgttgatagcgttgtcaaaatagaagatgccgcacgccatgaacgtaattgacttttaccacaattacctaaataacgtttacacagccgtctaaaatgtgtccctgatacaccatatcgttcacctatttgtgcaatattgctttttttctcatccaaataactaatcagatgtaatataagccagtaactttcactgtgtcttattgtcacaaaaagaggttctaattggctttcatctttcagtgcctcattaataatcagatgttctaatgttccactcccctcttttatataaaaaatttgttgattaatatcaaaattagtgccaactgctgtcatttttgaaaaatctctagcataatcaataaatgccaataatctggcacaaataaaaaatgatctcttttcaatacgccatgactgattttctgattgaaaaataacattttcattttttgaattataaataaaagcctttccctttataattttagtcgttttatcatcgtatattcttattggatattcatcatttaaaggaatgcacatgaataataaattccctgataaaatatttttatcgccacttatttttatatcatttattaacatggtaaatacctcagcctatacttataatctattaagggttcaaaaaaacaaactatttttcaaaatgttattatagccataatttatagaacactataataatatagcctagaattaactttaaaaataaataacaattctcattgattattattaaaaaaacaacagtaatatatcaacatttattttcaaataaaacacctatgtttttttaaagaatttcattgtttatatgactaaaatatatttataacatgaattaattaacatttattattgggttaactctatgctgtattatatttatgttctcagtggtcctttaaaagggataataacgcctttgctgcctaatcaatactcattaattctacatagtaaagaacatattgaaaataaaatagaaaatgagaaattaacactttacattccttgcaacaagaaagaacatgaaaagataattacgattatgcttgatgagcataatacaaaaaataataaatataaaatagaagatggtttaatttctaaagaaattagcaaagaactaccattagaactcgataagcctatatatatcaataattttcctattttcttaattagtcataaagatgatttgtctataacatcttttgatttaaattcaaaaaaatggacaattaatagaaaaatcattgtatcatttatatttgttattgcattttttatagtatcatttacttttatgaatgtatcaaaaccattagaaaataaaccaaaggaattggcttttaaaagttcatattcaaatgaatttaaaggagaaaatggttatttatgtatttacactgaaccttactcttctaaaaatttaataaaagatagtgattcaaaaacaaaaatttcatttttgaacaaagaaaaaattatcaaattagcaactaataataaaattcacgttactttaaaagacaacactaaacctatagtgagttttttttattataataaaaatgaaaagttaaaaatcattcaagccatcaatgacaattttcccaaaaattgtcagccaatcataaaagaattatcaattgctaaaattgttgaagagataaacaagctaaatttcactaaaacaataggatatactattgaagaaaaaaataacggcttaatttttatctttgatgataagctaagcgtaaatgacaaagaaaaatttaatgcttatataaaaaaacaggcagctttttttggaagaaaatttattttttatcgtgaaaataaagttaatatcaacttgaaaaataaagcaatgctacaagaagataatggatatatttttcttgataatcagcatcgttattttcctcaaggataatcaagctatgatgagtaacataacaaatttaagcacaaaggagtaatttatggctgcgagtcttgttgaaacagatgtaagttcaattagtaaagttgaccaatattttcataaacctgtgaaaacccaaagctatgagttatctgaagccttagaagcattaaaagctgatacatctaatgccgcggcattagccgaatatcaagccaaacttgccgaatataatattacacgtaatgcccaatctacatcaatcaaagtcattaaagatctagcaatgagtattattggtaatatgcgttaacatgagttttacggaggttatgtatggctattgcacctattattcccgttaatttaaccaaagaactacaagatacaagtgatgatagtttatcgactatcatggtaaatggcattattagtagtatgcaatatgaaaaaaagatacaagaaaagttaacaacattaagccaattaggtgatgcccaaagttatacgaatttacaaatagaacttagcgattattcaattacgatgagcttagcgagtacgttagcaagaaaatctctcaatattgtggaaacactacttaaggctcaatagtaatgaatagacggtatttgttattactatttttatgttgcttacttcctttattaaacggttgtaaggatcaatcactgctcactaatttaagtcaaaggcaagcaactgaaattcaagcggtgttacagaaacaccaaataacaagtactcgtactgcgttaggaaaaggattatttgagatctcagttaaaaaggaaaatatagggattgctattcaaatattagaagaatatcaattaccaacaatttctcgtattgaaattacacaattatttccatcagatgcattagtttcatcgcctcaagctgaaaaagcacgtttaatttcagccattgagcaacggttagaacaatcattattaaccattgatcatcttatcgatgcgagagtacatgtcagttatccactatcatcaaatgatcgtataacgccaacacctcatgcttctgctttagttttctatgaagatggcatgatagatagtgatcagctaagtgacgatgttcgtgcttttatccataatgcttttaatgatatggatgagagtaatattactgttttattatatccacggaatatcaataaatttacgatattaaataatcaacttcaccaagataatacgacatcattgagtagctcttggttactcatagggttatcaataattagtttaattataataattatggtcatattgattatttatcgtcgtaaacaagtcaataaaatggtaagcgagaatgagtaatctgactgctgaacaatttaaattgatctctaatgtaatgtatgaaccgttaagttatatccattcagactacgatgtattagcatcgccagaagaaaataccctatggcaaaaaatagctaatcgtcatttaattgggcaatatcaacttatactgcatattgattgtgagattgatactaccgtagaaaaaatatttactcattggcacactcttcctcgttgtgctttatttttaggttatttttattctcgtcatacgctattagcacaaaattattatcatttagaacctgcattaaaagcctttttagctctctatcctatgttaaataggactgtcgatagcaaaatattactgtcactaaaagatattgcccccatagatattggctatcaattactatttaattttattaagctaatatcgaacgcactagctcaacgttttaaattacttttttcaccaaaatctttatcaattaatattgaatttcctaaatcacttgttttatctcctacactttttttactggtattaaattatgctacgcttgttacctgacaaccttttaaaatatacctgcgaaggtgtattaatacgagctcactatatacgacagctcgataatattcataaaacaacattagcgaccaagcaggcagcaaaaaaaatgctgcatcactttaatcataaactagataaacttcgtaataagatagctaacgaagcttatgctaaaggattacaggttttattagctgatataataagattctcaattgaatatcaagaaaaatttgtacaatatgaatttcagcaacgagaacaactcgtcgcaacgatcggggaattcttagattcacctgaaatacaagttaaactcactcaatatctgatgtcatctgttcctcttgagcaaaaagtaacactcgatattcccacaacactacagcgctattttgagagtgaactcgacaatagcaatattaagttaaactgccataacaacaagaccattgctattcataccggtgatcaaattactttttttgatcctgccatatttctcaacgatctaagaacacaatttcatcggcctttttctgaaacttatcaaccgatttttgagcaaaacatcaaacaactgctattaaactttatcaatacatttaccccctcagacgatctttcttcaagaaagccaattttaaacgaggataacaatgaaaattgatcctttccgcgcacagcaggtatataactctccttcgactttatctagtgctaacaatatttcgagaaaaggatcagatcctattatcgaaaatttgaaactgactttttatcaagatttaagcaaagcggatcttagccatgctaatgatattcttactttattagaccaatttgatgtcaaagatggaggcaatcaaacgttaaaagagaagcgacaaatagccttattggtttatgctcaccaacaaagtgaattagaacatcatgaaaataaaaacttgattaatcaagcactcgtttcgcgactctcttatcaaggtttttatcatcaagtcaccctagaattattaggtatgattgataacaatgatgaattcgaaggtttttttaagcctgatagggtgacattttcattgtgatcataacatttgagcaccaggccctttttcccctaaaatatcatcagggttacgtaatgggcaatcatttaatgataggcatccacagccaatacagtgatcaagtccattacgtaatcgcttaagacgccgaatacgctcatcgagccgtattttccaatccgttgatatttcatgccattgttctgcagttaatttactatttggtggatatttccctaatatttcctgaatttcttttaatggaatacctgtactctgcgctgctttaataattgccacataacgaagtaccactgacgggtaacggcgctgatttccagggctccgagaactttttatcaatcctttttcttcataaaaatgcagtgtagaaatcgcaacaccactgcgttttgccacttcgccaaccgtgagcgctcgattaaaatctattttctctttactcatttgctaccttttttatttttcacttgacctcaagttaacttgaggttttatagtcttgtcccaatacaaagtcaagtcagccaattgcctgattttatttttttaagtttattgaggactgatacatgcctaactcaattgcacgtattcttgaaagccaaacattatggattgtcgcaagagtgctaattctattgttatttttatcatcgggttttgccaaggtatttgattatgagaatagtttggcagagatgcgtgcagcagggttaaaccctgattggttttttaatctcgccagcgccattgttttattcgccggatcgattttagtcctttttgatcgttacctatggttaggtgctggcgcattagccactttcttatttttaaccattgtgattgtacatacgttttggaatatgaccggcgataaagcgatgttatccatgtattttgcgatagagcatacctctgtgattggaggactaatggcaaccgcaatggctagccacttcagagcattatggaaaaaattcaactcataacaccctaaaaatagataaaaacttcactatgggatcggcggtaaaatgaataagaaattgacgttaactttatgtgcctcactatttttattaagtgcaggggcaatggtttatgcaacaatgggatctgatgaagatgaaacacagccatttgcttatccaccaacaaaagtggcattagcaaccgcgcaatccgctgaattacctaataccatgcatggtgttggagaattggaagccgctagacaagtctatttagcggcagaaacaaatgggcgcatcgccacgatccactttgcatcaggacagaccgtcaccgcgggacaaatcttagtaaaattaaatgatgagccagagcaagcggaattattacgcctacaagcacaactaactaatgcagaaaaactttattcaagaactcgccaactttatagtaaaaatgtggctgcagcagcacaattagatagtacgttatcagagcgcgatatgattgtagcctctatccgtgaagtgaaagcgcgcattgcacaaaaaacaattaaagctccctttgatggtattgtcggcataaaactcgtgcatgaaggacagtatctaaatgctgaggaacgtgttgcctcattagtggatgcaagccacttaaaacttaacttttcactcgatgagcaagtggcgccacagctttcaactcatcaacctattaatattgcagttgatgcttatcctaatcaaacatttaccggctcacttaatgccatagaccctcttattggcccttctcgcactgtgcaagtacaagccattttaccgaataccgataacaaattaaaagcgggcatgtttgctcgtgttcaagttacctcccctactcgtcatcaggcattaaccgtaccagagacagcggttacttatactgcctatggggataccgtgtttgtagcgcaatctgacaatcaaaaaaaccttatcgctaagcgtgtctctgtgaaagttggattgcgctacaacggccttatcgagatcaaagaaggcttaaatcagggagatcaagttgttacctcaggacaaatcaaacttagtgatggcacctcaatagcccccatagagcaagatacgttaacactggcccaatctactactcgtcaaccataacaggagtgtttcatgaaattcactgatatttttgtgcgacgacctgttttagcgttagtagttagcaccttgatttttttactgggcgcatttgcgttcagtaaactacctattcgccaataccccatgttacaaaactcaacgattaccattgcaacagactaccctggcgcatcgtctgaactgatgcaaggttttgtgactcagcctattacgcaagccgtttcctcggtggaaggcgttgattatatttcttcatcttcagtacaaggaaaaagttttgtcacggtaagaatggagttaaatcgcgatccgacacaagcattaacgcaagtgatggccaaggtcaatcaagtacgttataaattgccagaacaagcttatgatcctgtgattgaactttcttctggtgaatcaaccgcagtcgcttatgttggcttttccagtgagcaaatttctattccagaattaactgactatctatctcgtgtggttgaaccgatgttttcctccattaatggggtcgccaaagtacaagtctttggcggacaacaactggccatgcgcgtatggctagatactgataaattagcggggcgaaacttaactgctagtgatgtcgctgatgccattcgccgtaataattaccaagcagctcccgggaaggtcgaaggtgagtttgttattgcgaatgtttatgtcaataccgatttaaccaatgtggaagaatttaaagatatggtgatccacaatgatggccataatcttatacgtctacgtgatattggcaccgtcgagctaggtgcggctgctactgaaaccagtggcatcatgaatggcaaaaaagccgtcttcttaggcctatttccaacaccaacaggtaacccgttaatcattgttgatggtattcgcgaaaaccttactgatatagaaaaaacactcccaccaggtgtaaatgtggagctggcctttgaaacttcacgttttattaaagcttctattgatcaggtggtgcaaacattaattgaagccattttaattgttattgctgttatttatctctgcttaggctcattacgttctgtaattattcctgtgcttgctatccctttatctatgttgggggcagccggattaatgttggcatttggttttagtattaatttgcttactttactagcaatggttttagccattggattagttgtcgatgatgcgatagtggtggttgaaaacgtacatcgtcatattgaagagggattatcaccagtgcaggccgcattagtgggggcacgagaggtcgcggggccggttattgccatgaccatcactttagccgccgtttacgcgccaatcggtctcatgtcaggattaacaggtgcactgtttaaagaatttgccataacgcttgctggtagcgtcattgtatcgggtattgtggcattaaccttatctccggtcatgagctcattaatgctcaaaccgaaagaaaatgaaggcaggatggctaaaatagccgaatatacctttgataaattggcatattactatagctatttgcttaatttttctttaactcatcgctggttaaccgtcgttttcgccttcgccgtgtttgttagcttgccgtttttatatagccagacaaaacaagagttagcacctttagaagatcaagcgagcgttttaaccgcggtaaaagcaccacaacatgcaaatcttgcctatgcggaacatttcaatcagaaacttgatgatatttatatgagcctaccagaaacagacagcacatggatcatcaatggtactgatggcccttcagcaagctttggtgggattaattttgatggttggaaaggtcgtgatcgtaatgccaatcaaattcaggcagacctacaaaatcgtgttgcggatgttgaaggaagcagtatttttgcttttcaattagcatcattacctggctctgtcggcggattacctgtccaaatggtgttacgtagcccattaggttatcccgttttatttgacacgatggaagagatcaaacagcaagcacgagaaagtggtctatttgtcgtagtggatagtgatcttgattacaacaaccctgttgtacagatcactattgatcgtgccaaagccaatacccttggtattcgcatgcaagatattggcgaatcactatccttattagtgggtgaacactatatcaatcgctttggtatggatggtcgctcttatgatgtgatcccccaaagtatacgtcaacaacgtttaactccggcagcacttgcagggcactatattcgtactcaagataacctgttaattccattatcaaccgtagtcaatattaccactcaagttgaacccaataaattaacgcaatttaatcaacaaaatgccgctatatttcaagctattccggcaccgggtgtcaccatggggcaagctgttgcgtttcttgaaaatgtggcaaattccttacccgctggctttagccatgattggcaatctgatgctcgccaatttacccaagaaggaaataccttagtctttgcgtttattgccgcccttatcattatttatttggtattagccgcacaatatgaaagcttggttgatccattgattattttgattacggtaccactctcaatttgtggtgcattagtgccattagctttaggtatggtgacattaaatatctacactcaaattggtttagtcaccttgataggacttatcagtaagcacggtattttaatggtggagttcgctaatgaattacaagttcataaaaatctaaatcgacgtgaggcgattattgaagcagcaaaaatccgcttacgccctgtcttaatgactacggcagcaatggttatcgggcttattcctctgctatttgccagtggtgctggagctaatagtcgctatggattagggttgattattgtatcaggtatgttagttggcacgctatttacgctgtttgtattacccacaatgtacagcttcttagctcgaaaccatcaagtcagcgctcagactgagcgtcaaaaacaattacagcaaatcagtgagcaataaaaataacaagcgctaatgtcgtaaacccatccccattgtaaatacaatggggatggttatagttattttttgaataaatattattttatttcaatattatcattgactaaaggaatgttatgatttattgcaaacttaatcagctcatcaacttgtgatttccttttaagtacctccctactgcgattttcccttaaatgaacgagaatactttctaagctttttgtttttgtatttcctgcctctatcattttcatcatttccattaaagcaataaactcccctgttcttcctaatcccgcaagacaatggacagctatattttcttttgttgggtttattgttaattctttgccaatcaaatcaattgtattttttaattttgtcgcatctattgctgtatgatctctccaattataaatatgcacaaattttatatttttcttttcatcacaaccttttttagttaatttattaatatatactttgcaatctaaacttctttcatttagtaaaacttcattatctccatttttattttctataaatttcccatttttaccttttattttaaaacgactgaaatcccacttattaaagtggcgagattctatattatctgaataaaaatcctctctaaagtatttaaaccctttctgcttagaattgcttttatcatattcactatcaggttttgagaagtcccatttaatatccttattcgaggctaaaacataaactgtctttatatcattatcaaataacatattaaaataatgttttaaactctctttatcattaagaggatattggcttgcaatagtcgtataaggagagttcttaacactcacattattagtaggtaataataccccattagattctattaaagtttttttacaatatcgtactctatatctagaattaggtacacattgataattattttcatcatattgaggtgagttttcattataatataatttgttaagaacttctgtagatactaatctttggatattatttacattattgatattttgtcgcatacagagaacaggtgcttttttttcaggtaaatcttttgtataccatatagcactactattcttaacactactgacattaagatttcccgtgggatcttttattcctaaaaaatttcttatgctattaatttttgcacttacattaggtattattcttatcatatatcacccttttataacttagttttacataacagtctcctaactttatattgataaaaaatttaaaatataaaaaaaacatcttttatcaatcatgttcattttaagaaataaatataagtgaatataaaaatgccaatattgttgaataacatatcggcatttaaaattaaaagaaaatttagtctcttgtttataaacttatcttacatcgttgaaaaggtattcataattatcccaccagagataatcaatgccattgagaatatagcgggtagatcgggtttttgtttatataaaatcatggcaactaatgttaccccaacaataccaaatccacaccacaaggaatatgccacaccaacagggatatagcccattgcacgtgttaaggcgaaatagcaaatacagtaagcggcaatcactaaaacagagggggctaatttactaaagccattggtctttttaatcattgaggtgcctgtgatttcagaaccaatagacagcgccagccataagaatccggtaaacataatggttatccttatttattttaataaagtacttatttattaaaaaatagttttattaaatatagattattaagaaatagatttatttattcactgacgagcagtgtgttttatattcgataactccgtcgtttcttctggctcttcttcggaacccattttcgaaaacagattcataatgacgatcccgctggcaataactgccataccaataatagcagccgtatcaggatgttgaccgtaaaatgccatacctaaagtagatacaactaagataccggttccggaccaggtggcataagctaagcctactggaatatttttaactgcacgagataatgaataataacaaacaatataaagaacaataattaatcctaataataatgtctttgttattccttcactattatcaaacatttttaaggtcgaggttgctgaggtttctgaaataataaccgccagcatccaaagccatgattttgcttttggggacataataagactcctaaatttttagatatggtatattttaatctttcaaactttttaaatattcaatagcagaatcggttaatttatcttgtgataattggtatttttcagggttactcattacttgtttcaaagtaatatagcgattattattcagttgttttgtttccgttttattaataaattttaacttgtgatcaaaagcattcttttttaagttatcttcaacttcatttattgagcaaaaagtaatacccattgatattaatcgttcaatattctgttttagcactaagttatagtgttcattttggtttaaacctaaaatttcattaatttcactgtttggctgacaaaagtaaggtaatgcaataataggaatatttttagccaatgcggaatgaataagtgttccttcttcactaatcattaacccattaataatttcccccaccagctttttgtcaaaatagggaataaataatgcctgataagcagataacctatggggatcaaactcatcggctttagtgatatcccctacatggcaccactgcgataaatcatggcattgctgtgcctgtgtggtaacaaaaatagaagcccgtacagtggaaaaatggctaatgcgttgatagatttcatcacgatatcccggcgccggtgttaaaactaacaacaccggcttttttatacacttttctatttctgcaacaatccgttcaattaattgattgtccattacctcacctcattgtcttagctgacaataaacacgctgtcgttatttctaactcctgccgcatttgcctcatcggtatcaatatgaaattccaatgcaaatttatcactgacgcgcacaatcacttcatcaaaaatcaggctacgttcaccctctgtttttacatgcactttctgaccattggtcacatttaacgctctagcatcaatattattcatatgaatatgacgctgagcacaaatgacttgctgttttaattccacatatcccgcaggccccattaaaaccgcattaccggagcctgccaaatcaccggaactacgcacgggtgcctttatacctaatgcaaaacaatctgcttttgaaatttctaattggctttgtggacgaaccggccctaaaacacgaactttactgatagagcctttaggcccgactaccatcacacactctttggcggcaaattgtcccggttgttttagatctttaaacggggtgatctgatagccgtgaccaaataacgcatctacatcttgttgtgaaagatgtacatgccgattagaaataccaacaggaatagcgatcccttgatttatgcccattcccacattggggatatttaaacgagtgagaatttttcccattagttgttgattaatcattattttttacctttacggctttcaggtttactctcttttttactgcttggtgctttatctgctgtcattgctttagtttcaggggcactattttgagccagtctatctgcaacttcttttgtcgcgtcactatctccactttcgtgcttcatgacagtttcaaccctgttttcagccagcgttttgagtgcattctgttgtgtttcttcactaataacagcgctttttttcttaccttttattgtcagcaatttggtgataacacttggctctggtcttgctatgacgagtgatccgataaccaactctttttggctcaccacatctacaccatgctcaaccgctgtttttaccgcactgatctcaccttgaaaacagacagaaactaaccctgatccaatttttctataaccgataatttcaacactggcagctttacaagccgcatcagcagcttggatcgcagcggttaatccgcgtgtttcaatcacacctaaactgttcatctttctctcctactgattagtggcggacaagacggatctcaaaatcaaattgtttaaagaaggcttctaagcgatcgagctcttctggcgtatatcccggatcgtttttaatggggtagatcatctccaatttttggtatttattacggccaaattggtgataaggtagaatatcgatgcgctgaagattaccgcgttttgacaacgccatggcgtagttaatcgcaccagtaatcgcatcataagagtcgttataacctcgcactaaaggcatacggataaccacatttgcaccgagatccatcaaacgctctaaattacggcggacattctcattaccaatgccaaataatgctttatgctgagtagtatcaatgtgtttgatatcaattagaaactgatcaacgacttgcgctaatttttcataattagccacattagtggttgcttgtgtttccaccgcggtattgatcatcatctttttacattcacgtagcagagctacagcaaaatccgtttgtaaactcatttcgccgccaccgattgtgacaccaccgccggaagagatatagaagtcgtaatcttgcatgataatgtccatcaattcagatacagagacatctttacccataatatccagtgcatcagaaagacacacttcttcacatttacggcatccaatacaatcaacggcacgatcaacgcgatgaacttgctgcccttgctcattggttgtcatgtaatgcacacctgccggacacacatcaacacatttaccgcaatccacgcatttatcgcgagagtacatcacctgaaattcactgctaagaccttctgggtttgaacaccaagggcagcggatattacagccttttaagaaaaccagagtacgaataccatcaccatcataaatagagtatttttggatattaaatatccgccctcttatttctgctgccgtctccatctttacgcctccaaatctgcatcaaacatccttgttcgataaatttacatcttgtcttgtcgcgattaatagggaggactcttagccctccttaggtctatgatcagaatttctcaatcactgtacgactaataatttcatcctgaacttctttacataattcaacgaagtacgcactgtagccagcaacccggacaattaaatcgcggtacttttcaggctctaattgggcttttttcagtacttcattatcgacatagctaaattgcatctgaccattacccaaaatagaggcagttcttaataaggtaattaatccttggcgtccttcattggtatctagcaagcctttgaggaatttaaagttatgaaccataccgatattcatggtttcaacattcatcttgctgatggatttaatgatggcagttgggccatgtttatcggcaccctgtgtagggctgatcccatctgataatggtttccatgctaaacgaccgtttggtgttgctgcggttaattcaccaattggcgtgttattagagatagataacgtaccgtgactaaatgtggagtagagcattttatatttacggcattcacgttcagtccattcggtaatgtctaacgcatattggtcaacaacatcatcgtcgttaccaaatttcggtgcatttaaacagtcacgcagtaactcttcgtgcccttcaaaattagctaataagccgtcacgtatttgctctaaggtatattttttgtcttcataaaccagtttgcgaattgccgccatagaatcgacataagtggctaaaccagagaagatcagacccggtccgtggttaaccatcgcaccacccgctgtcacgtctttaccttgctccatacaaccttcaaccaatagcgacatgagtggttttggggcaatgtcacggtgaacgcgctggctgataaccgtaccaattgctgataaacgaataatatgtgcgacttgctctttaaccgcgcgatcgaaatcctcataagtacgtaaatcacgtaaatcgccggtgtctaagccttggtagctatcaaacagcaccatacgaccacgatttaatacaaattcaatggcaattggccactgggtataacccgttgatgtccattgatagatacgacctgatttttgtggttcaacacagcccatcaagcagtaatcgcgtgcatcttcaaagtcgaagcctttgcgcaacatcatcttgatatgagaatcatcgaagtgacaggcagggaagcccattcccgctttgaccacatcaacgattttttccatatattgctgtggtgattggttatggatacgacaagccagcgaaggttgatacactttcacaaagcgtactgcgtccataatcaagtaagttaaatcgttacaagcatcgccacctgagcgtttctgtccccccaccgttaagttgataaagggttgataaccggcaaaatattttgcgccaagttcactagacatccacattaattcggcacatttgatgataaaggcctgcatcatttccagtgcttgttcacgcgttaaacgacctgttttaatgtcgttttcatacattgggaaacagtattgatctaagcgacctaaagaaagtcccgtttggttctcttcaacttcaaacaatgattctacagtccagatactttgcagtgcttcttgcaatgtttttggtggattagcaggaacattttcattgacttgagcaatggtcaataactcttcacgacgttgtggatcactctctttagaggctaattcacgggcatgctcggcaatacgatgagcataagcgataaccccttcacaactttcaatcgacgctttatagaaatagatacggtcaatatcagcaggattttccatgcttaattcagccaatttcgcttgtgcatcggctttaataccgttcatccctttggtgaataacaatacgtcataaccggggcaagtatcaccaccaccattaatttgatgataagagagatcgctgacaaaggtttcgccactgaattcccatacacccgcttcacggtattgcgcttcacaaatttcatctaaagagcgaccttcccaaaatggcactatctcttcacgaatgacttttttgtcttcttctgaaatttggaatggatcttgtgggcgcgtgctcatggtgtcgagttcatcacgtacccaacgccatgcgatatcaggagagaaagcgccagcacgcggtttcccacaaggatgtcccacaataagctcttcatcttgaattaagataggtgcggtttcacaagcacggcggaaagctttagcacgcaataaaatagggggtaaaccaggattattgcgagcaatttcagtaaaggctaatgctctataaattgaaacactaggacgagcctctaaataacgattacgcaggcgctgtagacggggagttaagccttccattacagtcaactcaccatttgctgtcgccggtgtaacaacattggctgaaggtgaagcatattgcggtggtgtattcatacgaccgttatataaacggacttgtagtgaactgtgtaatgctgataaattagcgcgcgctgataacaacatttctgaaagttcgttaatactgacgcgaggatcgttaatatcgataccttgggtcatggcatcaaacatcggatagccatcgacttctttcgttgcgcgcacttcggatagctcagccagttttagccaaagactttcaacaatctcataagcttgtgctggcgttaaacggccttggtcaatatcacgttgatagaatgggtatagtgctttatcaaagcccattgggttgatagcgtagctaccattctccagatgaagaataagctgtaataaatagaaaacttgtaccgcttctttaaaggtttctgctggtttggcgggtactttacgtaaaatagccgcactttctaataattcagctttacggtatggattaccttccattgcggctaaattttctgctttagctgacagtagttgtgcaaaataaagtgccgcatcacatgcataaatcgccgatttgcagaaattggcttcatccatactgctacgatttaccgcactaccaatgcttctcattctatcttcaagttgtgctttgatggctaagaaaccttgattcaccaccagcatataatcaggtgatgtaacgctattattgatacttaaaaagcgataaatagagtcactacgcacttcttcttcgctgtggaaaatcgcaccacgtggtgttgaggattggctaccgataatgagctcatcttgagcgatatagcttggaaaatgacgaataaactgataaaagcgttgtgcaggtttaatcgcttggggcacaccggcaatattgttatctaatgaatcaaaaatcgtcgcacgctctgtgctaatagaactgttacgtgaaactaaacgttctgccagcatttttacgcgtggcgtcaaagaatatttggccatgtgaggctctcctgatgttctttactagacctaatcggtattaattgagcattaactgtgtgatacaccggcaaatgcctgacgatacaatgtttctaattggtgtgtgtttacgtcacgcggatttgtcggcgtacagctatcgcgtaaagcctgtccgaccatttccgttaaacgggcataaaagtccgcttcactgacaccggtatcgcgaatactcttcggcataccgatttcatctttcaatacattaatggcgacaataaggctgataacgccttcttttaccgtctgcgcaggtaatcctaaactttgggcaaggtaggcatagcgcttcgctgcttcgctattacaatcaccatgaagattggcattaaaggcaataacatgtgtcatcaataacgcattcgcacggccatgagggacatgaaaaacaccgcctaatgcatgggcaagactgtgtgtaatacctaacgacgcattagtaaatgccatacctgcgatgcaagatgcattgtgcattttttcgcgagcaagtaagttatccccttgatgatgacaatcaagcagatggctaaacactaatttgactgctttttctgccatcgcatcagaaaaatcagatgtagctttagacacataagcttctaatgcatggcaaaggacatccatacccgtatcagcggtaattgcaggaggtacagatttcacaagttcaggatcgaggatcgcgatatcaggcaacataaactcatcgaccaataccagtttttcactgcgtgatttgatcactgaaaaagaggtcacttcagagccagtaccactggtcgtggggatcgcaataaactgcggtttacttctactgtgctctttacgggtatgccagagggagtacataacggctttagcagcatcgataacagatccaccgccgagtgcgataaccaaatcaggataatgggcatccattattttcataccactgacaatggcagaaatatcaggatctgatgcaacatcatcatagatttgaaactcaatacctcgttgcattaatttttcagtgactttatctgcaaagccaaacttcaccattgctttatctgtcaccacaaatgcgcggcgggcagttaacccagagagaaaattcagtgcattggtgccaaactgaattttgggttttatcagaaactcactcatgtcgttattactccttactgtcccgataaaccttctcaacaatggcaaccacggacatcgccttgtaacgatctttgtttagtgcgaagtattcttcagccaacaccacatcgttgatacctgcacccacactatccactgcaacataggttttatttttcagtggattaagctcatcatctaaggtcgctatcattaataaattgcttcctttcagttcagggcttttttgtgtcgcgactacgtgtccgattacctttgcgaggatcatggtttatatcgccttctatcaatgagttatttacccagacgtccgagaacttctttgataatgcgctccacgttctcttcggtgatctcaccttgctcaatcacttgttgtgcacacgcactgactgtcgttgtataaggggacgcgccaaagcgatcatcaccttgtgtttgacgttgtgctgttgcacattccgcatgaacaggggttaaagaaggtgaacgaaaacgatcatcatcaagaatgctggtgtggtaatttgcgctagaaacagcaggttgagcagcttcttgtgctaatggacaaggttgttttaactcttcaacactacgtaccccataaccgactttacgaatattcagtaaattcatcgggccgacgttatctgagctagaaccaccgcctaccgcaccacaacctagggttaacgcaggagtaatattggttgttgcgccaataccacctaatgccgccggagtattaattaaaatacgattaacgggtttttctaaagagaactgacgaataacatcttcattttgggtatggatcactaaggtatgacctaagccttcgttagtgagcaattgcaccacacgatgacaggctgattgccaatcttcttcaatatacatacctaagattgggcacagtttttcccgtgaatagggattcttcggtgaaacagtatcttgtagtgcaatcaagacgcgggtattagcaggtacagtaaaaccggcgcgctggcttaaatagatagcatctttaccaaccaccgcaggatttatcgtgccattagcgcgcaataacatagaagcgactttcgctgcttcttcatcattcataaaataagcaccttgcgctaatagctcacggtgaacttcgttataaatacaacgttctacgatgatggattgctctgaagcgcagatcacgccattatcaaatgttttactggtgatgatatcgctcactgcttttttgatatccgcactacgctcaataaaggcaggaccattacctggaccaccactgatagttggtgtgcctgatgcataagccgcacgcaccattccttcaccgccagtagctaagattaatgacacatctttgctgtgcattaattcttttgtcgcttccaatgtcagcaatgtcacaccatcgacaattccctcaggtgctcccgcttctagtgcggcttttttgacaatttctagcgcgcggaaactacactgtttcgcattagggtgcggtgaaaaaataatcgcattacctgctttcagtgcaattagggttttatagataatggttgaagttgggttagtggaaggcactaacgctgtaataacccctaaaggtacccccacatccatgacttttttcactttatcgtcattgataatgccaatggtctttaggtctttcatatgttcatacacacgcaatgacgcaaaggtatttttcagtactttgtcttgccatttaccaaagccggtctcttcgctggccatttttgccaactcttctgcgtgacgagcagcttcaaatgcaatgtgtttgactatattgtcgattttttcctgcgaaaatttcgcatattgttgttgtgcatttttcgcgttacgaactagctcgcgagccagttgtcgggattgcaaatctttatctaatgcaaccatgttttcccccatacaggagttaaaaatttagctgaataacgttttttgcttggcagcacctgaataatcaggctttatgttgctctgcaatcttctcgatatcgttatgtggtcttgcaataacacgagaagtcactactgtgccgatacgttttgccgcctcaacaccagactcaaccgctgcattaactgcaccgacatcgcctttcaccatggcagtcactaaacctgaaccgacgttttcataaccaatcagttccacattggctgctttacacattgcgtcagcagcttcaatgcaagcgactagacctttggtttccactagaccgagtgcttctttcatatttatttccttcgttattcagtcactttgtactgggcaacgattttttgaatatcgttatgtggacgagcgatgactaatgaagtgaccaccgtacctacacgttgagccgcttctaagccagaatctacagcggctttaacggcacccacatcgccttttaccattgcagtgaccaaacctgagccaacattttcataaccaatcaattcaacattggcggctttgcacatcgcatcagcggcttcaatacatgccactagcccttgagtttcaataagtcctaatgcatcacccatacgttctcctaaggcaaagactatgccttgtgtttgataacaattttgttgatgtcattgtgaggacgagcaatcacaagtgatgtgacgacttcacccacccgttgcgctgattccacacctgaatctaccgcagctttcactgcccctacgtcgcctttcaccatcgcagtcacgagacctgaaccaacgttttcataaccaatcaattcaacattggcggctttgcacatcgcatcagcggcttcgatacatgccactaaccctttagtttcaatcagacctaatgcatcacccatttttatttcctccaggaagccgtttaacggtttacagttacccatcatgtctgcgtggtgattttttaaacgcagaccttggtttcaaattcactataacggctaaaaataaaaacaacatataaatccataaaagataaacatatagttttatattctgatatttatgcttatttagccttatttttatttatctatgctgttaattgcttttttttatctgtttaaatttataaaaaaacacgcaaagaagatgaaaaaaaagacaatttaagtttgttagaaggatgttgaaaaggtgcaaaaaggcagtacaaatcagcgggaaagatgtgcgggatatcactaatatttcaatgccagctcaaggatgagaaaaagctaaatctagtctatatacaaaaagtgctatttctaggttagccctttatgtcttaagccgaactcatcatgcagcgtccttagcaggcataaatagtcaatgtttccgtcgatggggggacagtatgagagagggaatattcgcaagaatacgtcgcaacgctcgcccaatatttattgagcgagaaagtaatgtggatttttaatcgaatttactgccgggttttaaggtacaaatatagagtggggaattgagcgaactgagtaataacgttttttcatttagcttttgtgcgttaataaataatccatcatgactatctgacatttcacgcataaaataatcaaaaataacatcgggagactcatcaatcgaggaggcactagactcccattgactgacaaaatagtgacgctcggtgggggaaacccgctttgtggtgtaatcaaatttcacataacgttgtaaatagagccaacccgctttagaggtagtatacccctcaaccacaatagagcctttgccattagcaccaaaagagaaatgaatattgccattcacattctcatcttccatattttcaaagcgcataatgccctttgttgaacaaaccatcataccttcatttttgatagttaataatcttgttgctgcataagtggcgaccaagataaaaatcagggccgataaaaaacataaaagtttccctgagattttcattagtatttccaagaatagtaaaagtaattatcgcaatagctaaatggattatcttcgttcttagcgcaatgcgctaaaaagacacgccctaagccattagtttgtaatttatcaccatagaaaaaaacaaagcgctcccctttcacacactgtaaattaagcttctttcttacagcgtcaaaattgcgaatataattatcactgacagaggagttaatcatggcctcgttagagagtaattcacaatcattatgggtgagaggtgttaatgtgataggctttgattgatgctgatttaaaaagatgatcaccacaagaaatatggcgccaaataaaaaaccaatactggctaaataccaacaaatttctggtttttgtggcgatgttgccgataattgaggctctttttctaattcactgtctagattatcaggctcggatgataatgatgtctcaatgggtgatgttgtattacttttatttgcttcaccttcgtgatcatttgtttgcgtaacaggtaacagtgttgagtcatcaattaattcaacagagatatcaggattaaactctagtcgccctttggcgatagtgacaataatattttcaataccataatgacgaaatgttttacgcaataaacttaaatattggtttaaattactatttgaagaaactagcccattgtcatcccacacgcgttttaatacttcatcacgatttactacaccgggattttgaataaaataaaagagtaacgcattagcggtaatagacagatgtgtatcaacgtcacctttttctaacgatatcgcgccatccgttgcgtcgtaataaattgaggcatttattctgtatttcattgtgccctcattcatcctaattaacatgactgatttgctgtgtcggccatatattcaaatgtcatttttaataatctttcaactaatgcactacgctcttgttgtgaaatcgtagggccttctgtgagttctgataaccaaaggccatcggcagcataacgaattaacgtacctaagtagctattatcaagtttatcgcctttggctaaatggcctaacatccaatcacgccaacattgacgcattattggctcgttaggcatagctaaagaaagtattgccaattggcggctttcatctgactgtttgagatcagaaatataggttaaataagcgcgagaaaagcgccctgcttctatcggatcgttggccataattaacgcaattcgtttatccataataccgagtaagcgtttgaataccgcctgtatcagttctatcttcccaggaaaatggtgcaataatccgcctttactgacacccgcttctttggctacggcatttaaagataaagaagcaattccttcattcgccacaataatacttgccgcttctaataactgctcttggacgcggataggatctttttttcggtgatgtgcggttgtattcatgcgtaggataataccgaccagtcggtatgttccttattgatcaaaatcaagcactattagagtgagccttattatatgccaataatgttgtcaacttcacattactttatttaaaaccaaatttaattttaaataataaaattattttatatttttgatctcaataaaatatttaattaacaacaaaaaaagagaacttgataattatcaattaaaaataaggataaatagtcattaagatatttcaataatgtggtaacgcaataaaacacactttctctcatagagaataaattaaacacccctttaaaagatcgattatttgtttgttttaaaataaaaagccctctttaaatttaaagaaggcctttctattattaattaaattactattacttaatcgttattaattaactattattaataacggttaaaaactggcgtttaatgcttgttctagatcagcgataatatcgtctatatgttcaataccaattgaaagtcgaattaaatcacgagaaacccccgcgcgttctaactcttcatcattgagttggcgatgagtggttgatgcaggatgacaagccaaagatttagcatcaccaatattgacaagacgcacaatcaatttcaatgcatcgataaatttcgcacccgcttcggcaccgcctttgataccaaaagagagaataccagcaggtttacctgacatataacgtaccgctaaattatgctccgggtggctggttaaacctgcatatttaacccagacaacttgaggatgattttgcaaatattcagcaactttttgcgcattttcagtatgacgctccatacgtaacgctaatgtttctagaccttgaagaattaagaaggcgttaaatggcgaaagagcggctcctgttccacgcaatggggcaacacggcatcgcgcaatataagcagccgcaccaaagtgttcaacataattaaccccatgataagagacatccggtgtattgaggatttcaaaacgatctttatgttcagcccaaggaaatttacctgaatcaacgacgatcccaccaatagagttaccatgaccaccaatatatttagtgagtgagtgaataataatatcagcaccatgctcaaaagggcgacataggtaaggcgttgctaccgtattatcaacaattaaagggacaccatgacgatgagccacagtggcgagagcttgaatatcaacaatattaccacttggattagtgatagattcacaaaataccgctttggttttctcatcaattaacgcttcaagtgccagcagatcatcatggggggcaaaacgcgcttcgataccgatacggggaaaagtgtgcgccattaagttatatgtaccgccatagagcttcgcaaccgacacaatgttatcgcccacttgtgcaatggtctggatagcataagtaatcgcagccatacccgatgccacagcaactgctgcaatccctccttctaaggcggcaacgcgttgttccaatacatcattggttgggttcatgatacgcgtgtagatattgccaggtacttttaagtcaaatagatcagcaccatgttgcgtatcatcaaatgcataagaggtggtttggtaaataggcaccgcaacagctttggtggttggatcaggtgaataaccagcgtgaacagaaagtgtctcaagtttcatagcaatccctttgttcttatcatataggtagcttctaaatagaagttagatcttttaacttataagtaatatagataagcggatattagccttgtcgcatagtgaaaaaatttcaacttataccaatgagacttttttaaaatcgagagtatttattcaaatacccccaattggcacgaaaatttgacttaagaaccctgttttacattcgatttgctcgtttttggcatttttgtcattttttgacgagtcgctaaccaacaaattaaagagccgcctgtcaccatcataacgccttgccaaaatgaaaaagagagtgctgtagagagtagtagggatgaaaaagccgtagaaattaccggagtaaaataagaaagcgtcgctaataatgtcacattaccgctgatcattcctgccgtccacgccgcattagctaaccctatcgcagccccagtaataagtaacagtgagatactttttacattaaccacccactcgattggagcagaaaaaatatattgcccccaaagtgccaatgctgttaagaaaaagaaaggcacaataccattgtgcccccccgaaataagacgagtcacattactgtaaaatgcccataacacggcgccgataaacgccaaaatataactgagaggattacgacaaatattattccataagctttctattgtcagtggattatcaccactaacaacccaaacaagcccactgaatgagcataataaacccacaatcaataggatagagaatcgctgtttatttaagaataccgctaatgccagtgtaaagctgggccataaatagttaaccatgccaagctctatagcttgtgctctatcactagcaaatcctagcgccagcgataaacagatttcatagctaacaaataaaagtgccccccaagcaaggtaacgcttaggaaaaagagataacttaggcacccctaagatcaaaatcaaaaatagcgttcccgttgtgtaaatcagcgcagcaccccctaccgcaccaaaatactcactgatattgcgaattaacccaacaatggtactccaaaggaatatcgccacaatgccatagagtgttccttttgatgtactggatatcatgtttataccttcagatttaagtttttctctatatagccgatagtaaaacagaatcggggtaattgcttgaattactcactccctatagaagaagcgcactcgaaaatgaaacattttgttacaattaatatagcaaattaaatatattgatttactcccaatacgagtaataaaagtatcttttatttttatacgataaaaatacgctttgtaatttccaataaaaatgaataaacaatatttctattttatttacaaataataaatttttattttaaaatttacttaaatgccccctttcagcgtgcttttttacttaacaaaaagccatttttcgtttcattttataaaaaaactatccataaaatacattttatgaaacatcatcttataagtataagtacgctatctttttacgatgcaccggataaatgatgagatagatgtaataaaatcaaataaaaaaccaaacaatatcaatcagataaaaaatcactcacaaaacattagacaaagtaatatatttttctattttttaacaattaaatattaccgatagttgagcagatattaatagaatttatctataaaaccagcaaaaaacgatcgtttaaaacgatttctctattttttttaccacatttataatttttgtaaatttgacttaagtgaatatatggcaatttattctttttcacgaagattgctatcactcgcttttgttttaataaataaaatagtcttatttggcattttccaaaaataatttaatccttgttttttattattaataataaaaacagaattaaatattagcttattttattaagctaagtattaaatatatattgaaaatataggaacatttaatgaaaaagttattattatctgcaattattacttcagcaatggccataattgctacacctgccctagcagaagatactggtacaccagcaccaacagaagttacagttaatggtggtactattaactttgaaggttctgtcgttaatgctgcttgtggtgttgatagtagttcaagtaaccaaactgttcgtttgggtcaattccgtgtcgctgaattcactaaaaaaggtgatgaaacaggacgtattccttttagcattaaattaaataactgcgatattactgtttcatcattagcagcaattacctttaacggtacagcttctgatggtgatgcaactgcattcgcattacaaggcagtggcgcagcaaccaatgtagcgttaaaaattaccgattcaagcagcaaaaatgttgttccaggacaaccttcttcaactcaaaaattaatcgaaggtgaaaaccaattaaattataacgcttctcttatttccactgatgatacagtgaaggcaggtagcgcaaacgttacaactaactttatggtgacttactcttaatcacttcatcacttttgattgatgtcttatcgccaaggacggcctatttttatcaaaagtattattactccatattcattagctaataaatatttattatgaaaaagatatttgcttttattatttttttattcccacttattgcttattctaatggtgtttcattaggtgctacgcgtattatttataattctaatattaaacaaactaatcttgttgtgactaattcagataaagagaatagttttctaattcaatcatgggtatctgataatcaaggtaataaaaataatgattttattgttacccctcctttatatattcttgacgctaataaagagaatgctttaagaattatgtatacaggtgaacctttacctgcagatcgcgaaagtttattttggatgaatgtcaaagctattccttctttagatgaaaagcttgctaatgaaaatacactacaaattgccatccagagtcggataaagcttttctaccgtcctagtggattgtccgcttatactgaaaaatatgccaatgaagtgactttttcctataaaaatggggagttaattgcccataatccaacaccttatcatattactatggtcaatttagctgcagccgacagtcaacttccttcaagtattatgattaacccattttcacaattaacattaggaaaagttaatcagaatgctaataccatttcattccaaaccattaatgattatggcgcacagactcctgttttaaaaaaagaaatcgttcattaatcacagcatctttttcaaccctgttggtcaaaaaccatggttaataagaatactaataaagatatcgtttattttctctttccaagtgtcattgcattgtcattgacgctgtccttttcatcatatagcgcaaaccgatttaatcctgcatttttggctgactctcctgatgccgtcaccgatttaagttattttgaagcaggcaaccgcattaaacccggtgattatcttcttgatattgtttttaatcatgagtatctgcgtagtgaaaatattcattttattagtcaagataaccatgttattccttgtttaaatcgagattattatcaatcactcgggatcaatattaaactatttgctgattttgagaaattctcggcaaatgaatgtattgatattgaaaaaatcattccagattctgttgttaattatgatattgagaaacaagctttaaatattcaagtccctcaagccgcgttagatttgaaagcacgcggttatattccaccagaaaaatgggataacggtataacagcaggtattttaaactacacctttagtggcgctaatagctggggaaattctcataataatagctactacttaaatctacgtagtgggatcaatattggtgcttggcgattacgcgattattccacttggaattcgtcaaacgggaaaaaccaatggaaccatatcaatacctatctgcaacgcaatattgtgtcattaagaagccaattacaaattggtgatagttatacctcatcaacactttttgacagtgttaattttcgaggtatttcattagaaagtgacgacactatgctacctgatagccaaagaggatttgcacctgtagtcagaggtattgctaaaggcaatgctaaagtggtgatccgccaaaacggttatgtgatttatcaaacctttgtttctccgggtgcttttgaaatccgtgatctctatccaacgtcaaatagtggcgacctctatgtcaccattgaagaaaatgatggtagcaaacacagctatgttgtgccttattctgctgtacctattttacagcgagaaggccaaaaacagtttgtcatccaagccggtgaaatacgccaaaataaccaacataaaaaacctcgctttatacaaggtcatcttatttatggcttaccctatgacaccactgtctatggtggtgcattagcaacaaaagattaccaatcttatgccctaggagcaggtaaaaatatgggtaccctaggtgccttctctaccgatatcacctttgctcatagccaattgccaaataactcaacatcagatggttattctttacgttttctttatgccaagtcgttaaaccaatttggcacaaactttcaattgctcggttatcgttactctacttcgggtttttacacattagatgagacattaaatacgcgtatgtccggttatctgtatgaagataatcaaaaaaaaccgttgagttattttaatttgcataatcgcaagaaagggagcctacaaattaatttatcacaacaactgggggattatggctctatttttatgatgaccaactggcaaaattattggggaactaatgagaaaaatgtcctagtacaaaccggctacaatggcaatattaaagggctctcttataacgtcatttatagttataacagaatgatgaatagtggtcagcgtgaccaaacattgtctgtgggtctttctatcccattacaattgctaatgccgacaagttatcaatccatcaatagcacttatctcacatataattacagccacaataataacggttactcgacacataatgcggggattgctggtacattattggaagacaatacccttaattacagtgttcaacaaggttatagcaatcaaggcggaaactataccggtagtgcggcgttgggttatcaaagtcgctatggcaatttaaatgctagctataactatcatcaagatgctcaacaaattaactatagcctcgctggaggtatgctactccatagtggcggattaaccttaagccaacccttaagcgctaatgccattttagtagatgctcgtaatactgcggatgtaccgattgataatgcgacaggggtttatactgactggcgagggtttgccgttattccctatgctaccgcttatcgacaaaatcgagtggcattagacaccaccgcattacccgataatgttgaaattgagcaaaacattaagcaggtgatcccaacacaaggcgccgtcattaaagttcagtttgatgctaaaaaagggtatcgcttattactgacgctacaacaccaaggtcgcccactcccttttggggcaatagcaactgataaacaaaatcatctgtccggtattgttggcgatgatggcttactctacttatcgggtgtccctgattcaggaaaattagagatccgctgggggcataatgcctctcaatactgtcaagtgaactatcaattacccgcctctcaacttgatgaaccttttgtgaaaatgacacaggagtgccaataatgcacaaattaatgcttattgtagcgttgtcattactgtttaccactaagggatctgcttacgatacattggtacacattaatgccagagtaacaggaaacacatgtacggtagagacaaactcaaaacgtattaccgtaaaattaggccaaatcgccacaaaagattttatttctacgacgataacgcaacaacgtacgcctgttatcccttttagtattaaattagtcgattgccaacctgaagccagtgctgtgaaggtcagttttaatggtcgtgccgatcctattgataacgccttactcgccattgatgcaacgggtgccaagggagttgccatttccattatggataacttaggagcttccatcgatattaacgataaaagccagtcttataccttattgcctaaccaagataataccctgcaattttatgctcgctatgtagcgactcaacttcctgttcaagccggatcggcgaatgcaacagcaacctttttactggagtaccaataatgacacgctctttttctttcttcacattgctggtttctcttctttgtatcccgagccaaatggcatgggctattgcagatccattagtggtaacccctccacctatgaattttgatggtgccgccgatggtactcccgcaggaacgcccatcacatcaacttggataggtgaaacctctgtccataatggtttcaaatgtgagaagaaatttttgcaaaaatgttgggttgaaaccctctatgctaatgctactggttcaaaaattagcgggatctactattacgaaggtagtaatcgttatcctgtttattcactccccggagttaaaggtatcggctatgcttttggtttaaaagataacaatgatagtgttgcttacgtacctattgatgttgataacggttcgggtgcaacggtgatttatcctgcagtaggctctaccgttaaccataatgtggatcgcgtttcactgaaaggcaaagtcgtctttgtggtgacagataaacatcttgagactggcgtttataacattccatatacagttatcgccaatacatggtctgaatatggtggaggccataaaggcaataatacctctatcgtagcaattaaccccgtcactattactattaaagctcgaggctgtaccgtaaataccaaaaatctcacctatgaattaggtgatatctcaatgcgagatatggcagccattggttcaacatcaaaaagtcaggctaaacccatctctgttacatgcgatagtaatgtgcatttatatgccagcatgaccgatcagtctacctattctaataatacagatatcctcacactgacatcagattctgatgcttctggtattggtattcaatttttctttaatgataatccaactcccgtggtgtatggccctgatatcagtgcgataggacaacctaaccaacgtttactccatataacaacttctaacaacgaaaactacatattaaacctgtcaactcgctatatcacgactgggacactaaaaccgggtaaagcaaacggattagccagtctcactttttcttatcaataatgatttgaatttttaaggctgatgaaatgattgatagcagcaaaacgattaattttcgtataggacaacgaatacgtcacttgcgaaaaaatttaaaatattcggggaaactatttgccaaagagttaggcataagtcagcaacaactttcacggtatgaacgaggaacaaataggatcagtattgagtttgtttatttaattactgaaaagtttgatgttcatatcagctatttcttacaaagtaactatatgattaatattgagcaacaacgaaatatacaagaaaaaaacagcctgctgattgccgaggcttgtataaaaaatggcactaatcgcccttaacttaattatcctttcggttcaaatacacactgtcatctattttatcgttgatttaatgataatgttctcttttttctatacaaatataagaagccaccgtttaacggtggctttttggtactgataaacttaattaacgacccgctttcagtttttggtaatagctttcgtataaaaccgtcgcttcacccacatcattttgccattcgcctttactgataatctcttcactagggtaaagtgagctatcttttgtgatagcttttggcaataatttttgtgccgctaaattaggtgttggatagccgatattttcagccacttttgcagcaacttcagggcgtaataagaagtcgataagcttatgcgcaccttcaacattttttgcatttgcaggaatagctaagctgtccatccagaagataccgccctcttttggccataccaactcaataggagcaccggcttctcgcgcaataaatgcagagccattccagatcatccctagattcacttctccttgcatataaggattggcaggattatccgaattaaaagccagtacattaggcatcagcttttgtaactctttataggcttcttcaatctgttttggatctgtggtattacctgaatagcctaattttaataaagccatttggaatacttcacgtgcatcatccgttaacagtaaactatctttatattccggtttccataaatcagcccatgaagtaatgctacttacatcaacttcatcactattaatccctatcgcagtcgctccccaaatataagggattgagtagtcattttgaggatcgaatgatttatgtaataaacttgggtcaagattatcaaaattactgagcttcgatttatcaatcttctgtagcatcccctcatgactcattttagaaataaaataagttgaaggaaccaccaaatcataagcaccatctttataggtttttaatttggtatacatgctttcgttagattcataggtggagtaaatcaccttaatcccagtttcttttgtaaactgttccagcaatcctggcggtacatattccgtccagttatagaaatagattgtcttaccatcatcagccgatgctgtaccaatacttaatgccattacactggcagcaagtacagaggaccactttttcatttaggcttccttcagtggttgatgcgttaatatcaaataggcgtaacgcctacctccaacagatttggtcatcaagaccgtaaaaagtgcgagaaactcgcactaatacttttaaattacgctttgccagttctatctcgtaagatcaactgactaattaatactaatactaatgatagccctaaaaggatggttgccagtgcattcacttccggtgaaacacctacttttaccattgagtaaatttttaatggtaaaatttcatagcttggtccagtcacaaaagaggagacaaccacgtcatccatcgataacgtaaagcttaataaccaccccgaggctactgctggcatcgctaatggcataatgattttacgtaaaatagtaaattcacccgcccctagatccttagcggcttcaagcattttgacatcaaaaccactgagtcgcgaatagaccgtgaccaccacaaaaggcagacaaaaggtaatatgcgacaccagtaatgaccaaaaccctaaggaaatgcctaatagcataaataaaaccaataatgaaatcgccatcacaatatctggcgacatcatcaccacaaacagcataccaccaacaaactttttaccacgaaaacgatagcgataaagcgccaccgcagccaatgaaccaatcaacgtcgcaaaggttgctgaggtgactgccatcgttaatgaatgccctgcagcttgtagcaggctgtcattatttaataaaatggtataccagtcagtggtaaagcctttccagttgatcccgaaacgtgatgagttaaaagagttaactatcagaatgataatcgggatataaagatacgcgtaaatgatggacataaatccaccccgcaataaccgtcctatcattctatttctaccttcttatgcagtagttttacggctcggtaatacacaaatagcattaaccccatcaccagtgttaaacagatactggtagctgccccaaatggccagtcgcgaatatttaagaattggctctttattacgttaccaataagtaggtttttcgcgccccccattaagtccgccacaaagaataagcccatggcaggtaacattaccaataaacaacctgcgatgatccccggcatagttaatgggataataatacgaataaaggtctgtaatttattcgcaccgagatctcgagctgcttccaaacagggtttatccagtttttcaatgctggaatagagtggcagaaccataaaaggtaataaaatataaaccaaccctaatactaccgcctctggggtatagataatccttagcggtttatcgataagccctatccacaatagaaactcattaaaatagcctttcgtactaagaaaaatctttaacccataaatacgaataagtgagttagtccaaaagggaactattaataaaaacagcagtaatggttgtattttcttaggcatttttgccagaaaaaaagcaaaaggataacctaatattaaacaagctaaggtcgctaccaatgccatattaatagagtgcagtaatacttctgcatacattggatcaaataagcgataatagttatcgagtgtaaaaaccatctcgactaaattcgcatcatcacgggttaaaaaactggtggcgatgatcatgatattcggtaagaagacgaacaccattaaccaacccacaacaccagtaataacgatgttttgaaatagtttacgtgttttcttcatcagccagcacgacctcccagctctcaacccaagttaccgctatcttttggtctaacgagtgatcaacatccggatcatcttcattaaagaattcactcaccatcaccatcttgccattttccatttcaacaacagaatctagcgtcatgcctttatagttacgttcacgaacataaccgataagtcccggaaggttttcaagatcgtgtatctcttcaacgcgcagatcttctggtctgagtaacactttcagttgctgattttgagtaacaggtaattgcgtataaatatcgcattcgtgcccttcaacatccgctctaatacgtgtctcatcaatacgatgtaggacacgtgcatcaaagatattgatttcacctataaattgagcaacgaataaattagttggctcttcatagatttctcgaggcgtgccgtcttgctcaatacgcccttctttcattaccacgatcctatctgacatagtcagtgcttcttcctgatcgtgggtgacgaaaataaaggtgatccccagttttcgttgtaaggcttttagctcattttgcatctgcttacgtaatttgtaatccagagcagacaatgattcgtctaacaacaataccttcggcttattgaccaccgcccgtgcaatcgcaacccgttgctgttgaccaccagaaaggtgagcaggacggcgttgggcaaagtcctccagttgcaccatacgtaacgcttccataacgcgactattgatctctgcagcaggtgttttctgcatacgtagaccaaaagccacattttcaaatacggtcatatggggaaacagggcataactttggaaaacggtatttacaaaacgctgttctgctggaatatgggtaatatcctgtccatctaggataatttgtccatcatccgcgtcttctaagcccgcaattaaacgtaataccgtcgtcttaccacagcctgaagggccgagtatggttaaaaactcgccatggttgatagtcagatcgaggcgggaaatgatttgttttccgtcgaaacctttacttaaggattttaattcgactagtggtgtcagagatgttttctcagtcatttaaggtaatactctatcccgaagaataatgcagatagaaccgccgccggaaaagactgtgtgagctgccggagcagtatgctccacagaagcccaaaaccagcaacgccgtatgtatagtacaaggggcaaatgataaacgtagtgaggtaaaattgaaagcaaaaaggtacatttcttatgaaaaactattcatttttaagcttttcatcataactttcgactttgttataaaaaacaaaaaatagaatataatcaaataattaataataagtataaatactaataaattattttaatttatgattaaataaattttttatcacaaatcattctatcgcggtattttcaagtctaaaacagacttaaaaaagattattttcagcaagataaatactaaaaataccttccatagtcttaagccatagaaggtatcctttctattaattatattggattaaattttttaaatgtaagatggcattatttacattaggcaaagggcctatcttttcatttaatgatggataagttcctgttttaatcagtagctctcgcatctctattggcgttaataccgtgttggttttatctttataccaagattgaataaccgcagccgcccccgcgactaatgcacaggctgatgatgttccactaaaattagccgtatatttgttattcccgtcaccatgaaaaagatcaccatatccggcagtggtcacatcttctccccatgcttgcacatgtatgggggagccatgcgttgagaaaggtaaacgatttagcgtataaggcgagcccgcaccgacacgtatagagtggttatcgctacgttgacgatagctatcataaaaaggtaaatcgagatcaacccccccattgccggcagccatgatcacaataatccccgcttctgttaatgtacgagttgcctcccagatatgcatttcataatcagcaggaacataagcatgatgttcacaaactgtctgcatctcatataaaacaatatcacccgcgtgtaatttctgtttactggcaataattgcttcaatacgaccactgcttaattctgatatggcataaaacatatctaatttataagcaagcccagtaatacctttaccgtcttttttccccataattaaccccgccactgccgtaccatggtcggcttgatcggttttttcagttaaaggaaaaagtggcgtgatattattagctaacaaatcgggatgtgataaatcaaaatcccactcaatatcggccacctgtataccttgtccataagcatttttattccaagcgtctataatacctaacccagttatttcatttgattttatttttggggtttttaaataatgctgatggcgagttaaatccggcgtaatattaggtggctgtacaggtaattttggaattttttgcacatattctatatcaggatgttgttttaatattttaataatttcatctaatgtatatgtgttatcattaggtaaatttaaataatagtaatcatttaaatgatttgatgtaagagaaagatgatttttaggtggtaattgtgatgatgataatactggaacaaaagaaatattagataaaaatgtattatattgattatggtaaccagagcgtaatagttttttattttgatcaagtgaatgtatattttttagtttgactagtattttcctttcaatattcataaccaatgctccttttctattttttatttttacttttgttttataacgtagatttttgagcattggctattttcatttttaatagcattgagataaatttaattattaagataatatactgtgtatttatactcattaaataatttagtttttcttagacaggatgcacttccatttgaatgggatcaaagatccagaccagtgagtgcacaatataaatctttttcattgttttacttgagtcgcattgggatggttgccttgagctgaggctggttttggaatgaaagtaacatcaataccaaccgttaaaggccaagctttgcgtctcttctgcattgattggttggtgtaaaatatctgatgtgactttttacagcgtaaaatcgcataagagtggttgtttgtaagtaaagagtcgagagttagatagcgtcttaattattgattttacaggcatattgatattccactctgatgataaaaaagtatatctatacatccgatgaagaacaagctacttgacatcaatcgggaattgactagaatctaatcatcgacggaaacgtcactagattgaaagcgcggtacagtgtgaagctggttggtcttagaccccgttagcgagatattttcgaagggctccttataggagcccttttcgatctaataattaaacctagattagttcatcaataattaagcttcgtacataaaatctaattatatcggcctcgttttagggaaagatcacaccacctgctctatcacattttgttatgctatagtaagccatctcgatataaatcctctcttactctcagtaaaacaccaaaatctggtgtcctcattggtgtcctgataaagagaaaacacactaaaatgggttataatgcacgaaaatacaccaaccgataaaacactagaaaacaagcaaacacagggcactcaagggaattacccacttaatcgcttctctgttgcacctatgctcgattggactgatcgccattgccgttatttctttcgccagcttaccaaaaatactttgctgtatactgaaatggtcacaacaggtgccattattcatggcaaaggtgattatttaaaatatagcaacgaagagcacccgatctcattacagcttggcggcagtgatccacaagcgttagcgcaatgtgcaaaattggcacaagagcgtggatatgatgaaattaatttaaatgtaggttgcccttctgatcgggtacaaaatggacgctttggtgcttgtttaatgggtgaagcacaactcgttgcagattgcgtgaaagctatgcgtgatgtggtcgatattcctgtgacggtaaaaacacgtattggcatcgacaaccaagatagttatcaatttctatgtgattttattgataccgtcagccgtgataataactgcgatacctttattattcatgctcgcaaagcttggttatcgggattaagccccaaagaaaaccgcgaagtgcctcctttagattatcctcgtgtttatcaattaaaacgtgatttctcgcatctcactatggcaattaatgggggaattaagtcactagaagaggcgcaggagcacttaaaatatatggatggtgttatggtaggtcgcgaagcttatcaaaatccatcaatattggctcatgtggatcacgtgctttttgataatcagttacctgttgctaatgccgtcgctgccgtaaaagccatgtatccttatattgaaaaagagctctcacaaggcacttatttaggtcatatcacccgccatatgttgggaattttccaaggtattcccggggcaagacaatggcgtcgtcatttaagtgaaaatgcccacaaacaaggtgctgatttaaccgtgctagagaatgcgctcaagtttgtgaccgaaaaatagtcctttttaacctgtgataaaaatccatcttactcaaattgcttaatcaactatttagttaatcagttaataaagatggattttttatacttgtaacctttaaaaactatgggatcaatagacttgaaccttgagattgacgactttcaagataacggtgtgcggctttagcatcagctaatgcaaatttctgattatctggcacactgacatcaattttaccacgaccaattaacgtaaatagtgcttcacttgctgcatctaactcttcgcgcgtcgtaatgtagccggaaatagaaggacgagtaacataaagtgaacccaatttattaagaatacctaaatcaacccctgttaccgcaccagaagcgttaccaaaactgaccattaagcctcggcgttgcaaacagtgcaacgaatccaaccaagttgctttgccaacagaatcatacacaacgggtactttttggttattggtgagcgcaaggacacgttcaacaatagattcagtttgatagttaatcactttccatgcacctgcggccttagctttagccactttctcatcactgcctgcagtaccaatcattttagcgccaatcgctttcgcccattggctggcaattagcccgacgccacccgccgctgcatggaataaaaaggtttcccctgcacgtaatttgtatgtttcattgaatagataataaaccgttaatcctttcaaaaaagaggcggcggcttgttcaaaagagatattatcaggcaggcgagctactttattttctggtacattatgcgtatcgctgtaggcgcctaatggagattgtgcatatacaactctatccccttctttaagtgaagtaacatgagcgcctgttttaatcacaacaccggcagcttcagttcctaagccacttgggaaatgctctactggatataatccgctacgcacataagtatcaatataattaatgccaatggctttattggcaacctgtacttcgttatcgcctagaggggcgggggtaaatgaagttagctcgagtacatcggcattaccatgagctgcaaactgaatgcgtttagccatcgtaatctcctttataagattgatgattgacctaggattatataaaccagcgttgtaacgacctgtagagataatgacaaatgatcgttatttctacaaggcacagattattgggttagcgtatactaatgcgctgattgatattttttcgactttgtgcaggatttatggccagaaacaagaccactgacaagctaatgtctgagataaaagatcgccaaatggaagggttgaagcttcccccccattcgctagaagccgaacaatcggtgttaggcggtctaatgatagataacgagcgttgggataatgtctccgagcgtgtcactgccgatgatttttatagccgacctcatcgcactatttttgcgcaaatgcagcgtttacttgagctgggtaaacctattgatctgataaccttatcagaagcactagaacaaaacgcagaattagaaagcgttggaggctttgcttatttagcagaactatccaaaaatacgccaagtgcagccaatattaacgcttatgccgacattgtacgtgagcgtgctgtcgttcgcgatatgatcaaagtcgccaatgaaattgctgatgctggatttgatccccaaggacgcaccagcgaagatctgctcgattttgctgaatctcgcgtctttcaaattgccgaaacccgcgccaataaagatgaagggccaaaagcaattgatgccattttagaagaaaccgttgaaaaaatagagcaactctaccaaaaacctcatgatggtgtgacgggggtatccagtggctatcaagatctggataaaaaaaccgccggactgcaaaaatcagatttaattattgtcgcagcacgtccttctatgggtaaaaccaccttcgcgatgaacttatgcgaaaatgcggcaatgacggaagaaaaacctgtacttatctttagcttagagatgccaggtaaccaaatcatgatgcgtatgctcgcttcattgtctcgcgtggatcaaacccgtattcgtactgggcaacttgacgatgaagattgggcgcgtatttcaagtaccatgggtattttgcttgaaaaacgtaatatgtatattgatgattcctctggtttaacccccaccgaggtgcgctctcgtgcccgaagaatttatcgtgaacatggcggtttaagcctaatcatgattgactacttgcagttaatgagagtaccttcattatctgagaaccgaactttagaaattgctgaaatttcacgctctttgaaagcattagctaaagaattacaggttcctgttgtcgctctgtcacagttaaaccgtagtttggaacaacgtgctgataagcgcccagttaactctgacttacgtgaatcgggctctattgagcaagatgccgacttgattatgtttatctatcgtgacgaagtttatcacgaaaatagcgacctaaaaggggtggcagaaattatcattggtaaacagcgtaatggccctatcggtacggtaagactaacctttaatggtcaatggtctcgctttgataactacgcaggccctgcttacgacgacgaataaccatccaccttgacggaataaaaggaaatagagaaataacatgaaagcggcaaccgcagtaatagatcgccgcgctctgcgtcacaattttcagcatgtaagagactatgcaccacatagccacctgatagctgtcgtgaaagcaaacgcttatggtcatgggttattagaaacagcatatactttaatggatgatgctgattgttttggcgtagcacgtatcggtgaagccttaacattacgtagtggggggattgtgaaacccatcctactacttgaaggcttctttgatgctgttgatttacccattttggtggttaaccatattgagactgttgttcatagtgaagagcaactcgaagcgttagaaaatgccgatttagaagaacccgtaaaagtctggatgaagctcgatactggaatgcatcgtttaggcgtccgtcctgaagaagctgaggctttttatcaacgactttgtgcttgtaaaaatgtccaacaacccgtcaatttggtcagtcactttagtcgcgcggatgagcctgatattcctgaagtcacacaaaatcaaattcagctatttcaagcctttatccaagataaagcgggtgataaatctatcgctgcttctgcgggaattttattttggccacaagtccattatcaatgggttcgccctgggatcatcacatacggtatctcaccaacgggtgataacagaacaggtaaagactttggtttaaccccggcaatgacattaaaaacgagccttattgcggttcgtaaacataaagcaggtgaacccgttggttatggtggtacatgggtaagtgaaaaagatacttatctgggtgttattgctatcggttatggtgatggttacccacgtagtgcaccttctggtactcctgtttggatcaacggtcgaaaagtgccgattgttggacgcgtttctatggatatgatcagcgtcgatttgggatctgagctaattgatcgtgtcggtgatgaagctattttatggggagatgtgctacccgtagaagaaattgccaaatatagtggtattagcgcgtacgaattaattaccaaattaacttcgcgcgtcattatggaatacctagacgaacaatagcacacaagatattgtatctatctggcacacaaaaagtgattggagaataaaagccgtgtttcaacaggttgaagcgtttgcgggagatccgattctctcattaatggatgtctataataaagatccacgtcaagataaaattaacctaagtattggtctttattatgatgaagaaggcaaaacccccattctaggcactgtgtctgtggcacgtcagcagcttaatgcgatgacacctaccgcaacactgtatttgccaatggaaggactcgccccttatcgccacgaagtacagactctcctttttggtgctgataacccgcttattgcagacaaaaagattgctaccatacaaacattaggtggctccggagcgctaaaagtcggcgcagattttctacatcgctattttccaagctctgaagtttggatcagtgatcccacttgggacaatcatgcgtctatttttgcgggctccggttttaaagtaaattattatccttattttgatcccgaaaccaaaggggtcaaattcgatgcattaatagattgctttaaaaaacttcctgaaaaaagcatcgtactgatgcacccatgttgccataatccaacaggatccgatctcaccaaagcacaatgggatcaggtcattgagatcctcaaagcgcgtcaagcaatccctttccttgatattgcttatcagggatttgctgaaagtttagatgatgatgcttatgcggttcgcgctatggcaaaagcggggttacctgtattagtcagtaactcattctctaaaatcttcgggatttatggggaacgggcgggtggcttatcgattgtatgtgataacgcgaaagagtgtgagcatgtattagggcaattaaaagcgggcgcacgtcgtatctattcaagtcctgctaactatggcgcacaactggttaatcaagttttatcagatcatgtattaaccgcacaatggcaaaaagaagtggctcatatgcgtgaccgcatcaaagagatgcgtgtaactttagttaatgccttaaaagaagcattacctgagaaaaactttgatcatttattaacacaacgcggtatgttcagttataccggcttttcaccagagcaagtagatagattacgtgaagagtttggtatttacctgattggtacaggtcgtgtttgtatggcgggtgtcaataacaataatgtgcagcgcattgcacaagcctttgcagctgtcagttaattaatataaccaaccattcgttgctgatattagcttaaaaaaatacctgcctattttcataagcaggtattttctttactgcattacaacatttttcactgtctttttaggtctttgccttttatgcattgacagcttgctgcttttccccggcattacggcgtgctttttcttccatgatctcaataatttgaatatctgtatgttgcattgcacgactagctaatgcgcagagattcgcaattgaactatcaacatcatcactgacaatcccgtcagtgcccgctacactttgattttgcatcgccattaaaacggctttatacgcactcgccgcactacttgatactttcatcgcacagctatttgaggcgccatcacagataatgccactaatatcaccaatcatactgttgattgacatacttacagtggtgaagtctttagtcagtagccatgccatacccgcagccgcccccattgatgcagtggttgccgcacacaatgcagacagaggtgggaaatggctatgaacataaatcgccattaagtgcgataaaactaatgcccgtaataaagtttcgtcatctgcttgaataaattcagcaactaccattaccggcaatgttgcagcaatgccttgattaccggagcctgagttactcatagcaggtaatacagcgccccccatacgtgcatctgaagcggcagacgttcttatcatgatttcactcagtaaatccttacctaataagccattctcttgctgtgaaaccagcgtccgccctatcgccaatccataactattttttagcccttcttctgataaagcaccatttagataagccgcatcaagcataaaggcgacttgatctataggtacattgagtgcaaagcgataaatatcttcagcacaaaccgtcgcaaaaggcttttcttctacgctatccccggcatgagtcaaactcgttttatcatcctcaaaaacaactttgccattacactcacagcgcacaacatgggtatgctctttagcaatactgacaatggcataacctgactgaccatatacttttgcttcggagtagagtacatcactacatggcgttttcacgccaaccgtcacttttccttcagcaaccaatgtcttagcctgagcgatagcttgtggtgatactgtaagtaatacttcaaggccagcatccggattgccccctgtcgcccctaatgcagccgcgatgggcaatcccgccattcccgttcctggtactgttacgcccattccgtttttcattaaattaggcgaaacccacgcttcaataccaacaacaggctcagctaataacgcggttgcttttgccgcagctaatgccaatgaaatcggctcagtgcaacctactgctggcttaacaccttcacgtaattgacgaataaactgcgaccataaatgagaattattgttctggctcataatctaacaccttggattaatatcgtttttaataacagctaactcgaaccgcagttgacgactatgagaatgccaagaacggagaaacacaaagtagcagacccgtaaagataatcagataaagtgatgcgcctttgtatttatgtaacatcggtactttgtacactaggtatgcagggataagacaaccgaccataccaaagataggactacaaattgaggtaaagctcagtactggtgcattgagaataatggcgccccaagctaacagcacagcaaagatcataatgccgttttgtacccatttttcattgattttttcaacgggcatcatgcgctgcagaatattcatcacaatcccttgtgtggcttcacggaaaccgagatagacaccaaagaatgcggtcattactgcgaaaatattcaacattacactcactacggttacccaaccgccagggaagaattttgccgcaatcgctaatgcagagatattttgctcataagcttttactgcttcatcatgtcccattgctaatgtgaaggagattgcatagaaaaacaccgtacagaacaacacaccgaaagcgatattcattgcacgtaatgctttatgacgcgctacttcacgattttggttacgactacgataagagataaccattgggcttaatgtttggataaacaaaatagaagttaatgtaaaaggtagtgtgataatggcttctttaattaaacgtccggcagggggtaatgcgccaacattatacagatgccacataccaatcattgaaagacctaatgccgcaacaaccagtagttttgtcattaccataaagcttgatagcttaaacagtaattgttcaccacgagaagaaatagccactaacgcacagattaaaatcagaccatagaatggattttctgataataaactgtcagtcacaccaaaagtttgtagataagaagcactgtcattcgtgatagctgtggaatagacaaacatccaaatcactaacatcacaaaatagagtgcacctaataaaataccccagtttttaccgagataaccggtgataacgcttgggtagtctttacactcaggagattcagccaacgtattaataaataggcgttggaaaaggtacattgcggggtaaccaatcacggaggaaagtaagaaaacccacaatcccattaagccaacctgtacaggtaaaaaaacaatccctgcaccgatagccataccgatactcatgataacccagcccacatcattgccgtcaaatttaattgctgcacgccattgttcttctgtcatacctgctcggcgagcgccagcactagttgcgggatagcttgttgtctctgtttttgaggaagccgtttccatattagtactcactttttatattgtaattgttaatagcaaaacgaattttgggggtaaaaagaactatctaactttgcgatgacctaatagccttactttttgcaggtatttttattatgggtaaatgataggaaatattgcggagaaaaaagttgttataaatcgtgatagctgaaaacgttttgggaaataattctctcacaaggagaaaagtaggattatctgttcaaagggaacagtaaataataaccttccccctacggcaaccttttgatttacataacactttgaaatataacaaaatatcactattgttatacaataatagtcaagtataacaaatgaaacaaatccatgaataaactgtgctatgcatcacgatatactatgataatcctttctatttagctttgttatctcgtatttagttaaaataatgtaataaaacagcagaattaactatttattcttttttttataaaaagagtgttaattatataaaaagcggctatcagcgtgactgacgaaaaaagaatagttttatctaatagaattaatttctctaataaaatatcaaattcctttttataaagaaaaacgctacaaacaaaatttgtagcgtttagacaagaagtgcgtaaaccgagtgctattaataaccgcgctctaaaattggtttcaaaaaccttgccgtgtgggagccttcaaagtcagcaacttgctctggcgtaccggatatcaagatctgaccacccccactgcccccttcaggccctaaatcaacgatccagtcagcggttttgatcacatcgagattatgctcaatcaccacaatcgtattaccctgatcacgcaactgatggagcacatcaagaagtaactcaatatcggcaaagtgtaaacccgtggtcggttcatccaaaatatagagggtttggcctgtaccccgttttgacaactctttggctaatttaacccgttgtgcttcaccacccgataacgtagtggcagattgtcctaaacgaatataagagagtcccacatcaatcaatgtttgtagcttacgcgctaatgcaggcaccgcatcaaaaaactctcttgcttcttcgattgtcatatctagcgcttcgtgaatatttttccctttatatttaatctcaagggtttcacgattataacgttgccctttacactgatcacaaggcacatacacatcaggtaaaaagtgcatttcaacttttaatacaccatcgccttggcaagcttcgcaacgcccccccttcacattaaaactaaagcgccccggcgtataaccgcgagttcgtgattctggtacaccagcaaaaagttcacggatcggggtaaatactccggtataagtcgcagggttggaacgtggcgtacgaccgataggactttggttaatatcaatcactttatcaaaatgctctaatccctcaacgtctaaataaggtgctggcacgctattagtggcgccatttaattgacgttgggcaatggggaataacgtatcattaattaaggttgatttacccgagccagatacaccggtaatacaagtaaataaaccaacaggtatttttaaattaacgttttttaggttattacctttcgcccctaaaatagtgagcattttttcgcgatcaacaggaacacgcttttcagggatagcaatacggcgttcgccacttaagaatttaccggttaatgagttgggattattaacaatatcttccagtgtaccctgagcgactatctcaccaccatgaacgccagcacccggcccaatatcaataatatgatcagcggcacggatagcgtcttcatcatgctcaacgacgatcaccgtgttacctaaatcacgcaagtggatcaaggtttccagtaggcgatcgttatcgcgttgatgcaaaccaattgaaggctcatcaagtacatacattaccccaactaatccagcaccaatttggcttgctaggcgaatacgctgcgcttcgccgcctgataatgtctccgctgaacgagaaagagtgaggtaatttaatcccacattgaccaagaattttaatctgtcaccaatctcttttaatactttttcggcaatcttcgctcgctgaccactgagttttagattttggaaaaagctcatcgcatgaccaatactgtaatccgcaatttcaggtaacgtggtattttcaacatacacatggcgagcttcgcgacgtaagcgagtacctccacaagaggcacaaggacgattgctaatatatttagctaactcttcacgcaccgcactcgattctgtttcacgatagcggcgctccatattatttaataccccttcaaaaggatgatggcggaccacaacatcccctcgatcattggtgtatttaaattcaatattttctttacctgaaccggataaaatcactttctggatcttgtcgggtaatgagtcaaagggggcttcaacatcaaaatgatagtgctcgcctaatgagcgcaacatttggaaatagtaaaaattgcgccgatcccaccctttaatcgcaccaccggccagagaaatttctcgattctggatcaccaaatcaggatcgaaaaattgttgaacacctaaaccatcacaagtaggacacgcacctgcggggttattaaaagagaataaccgtggctctagttcactcatgctataaccacaaataggacaggcaaagtttgcagaaaaaacaatatcttcagcactgctatcgtccatatcagagataacagcagtaccgccagaaagctctaatgcggtttcaaaagattccgctaaacgttgagccagatcgtcacgaactttaaagcgatcaatgaccacttcaatggtgtgctttttctgtaactccaaggtagggggatctgataaatcacacacttcaccatcgatacgagcacgaatatagccttgtgcagcaagattattgagtaattttacatgctcacctttgcgctcttttacgattggcgccaataacattaagcgtttaccttcaggttgcgctaaaacattatccaccatttggcttaccgtttgagccgctaaagggatatcatgatcaggacagcgcggttcacccacacgtgcaaataatagacgtaggtaatcgtggatctcggtaatggtgccgaccgttgagcgcgggttatgtgatgtcgatttctgctcaatcgaaatagcgggcgataacccttcaatatgatcaacatcaggcttttccattaaggaaaggaactgacgagcataagctgaaagcgattcaacgtaacgccgttggccttccgcataaagcgtatcaaaggctaaagaggatttacctgagccagaaagtcccgtaataacaataagtttatcgcgaggaatgaccaaattgatattttttaggttatgggtgcgagcgccccgtacttcgattttatccatgaatatatcccggattaagtgagtcgccgaaaaagaaagaatcggataattatgacacaaaactagctgaatggatatacagtatatatattgaaactgaatgataatgaaaatttgccatattaagacaataaaatgtcgatcctgttctcaatggagaaattcattactcatcatattcaaattttagcttacgtgataaacttcatcgcttatgatttcaaaaaatttactttcgcaggagtacctcacatggcgagcagaggcgttaacaaagttattcttatcggtaatttagggcaggatccagaaatccgttatatgccaagtggtggtgcagtggcaaatctgacactagcaacttcagaaagctggcgcgacaaacaaaccggtgaaatgaaagagaaaaccgaatggcaccgtgtggtcattttcggcaaactagcagaaattgctggcgagtatctgcgtaaaggttcacaagtttatattgaaggtcaattacaaacacgtaaatggcaagatcaaagtggtcaagatcgctacagcactgaagttgtggtgaatatcggtggcacaatgcagatgttaggtggccgtggtggtcaagataatgcaccttcacaaggccaaggcggttggggtcaacctcagcaaccacaagcatcacaacagtttagtggtggcgcaccatctcgcccagcacaacaacccgcagcggcaccagcgccaagtaatgaaccaccaatggactttgatgacgatattccgttctgacggttacttaagaactcaccttatcttctaagtcatataacatcaaacgctaaagcctgttataccattaacgggcttttctttgtttcatgcttatcccgcatttgccaatcatattgtcacaccttgtctatttcccattgtctatttcccattgactattactcgttcatcattggcgttaaggtaagtcttgtgaatgagtattagcccctttcaccatggttagatttgatttactgataatgacaatttatagcgttattttctcaaaatcccactttccacaaaggtttgctcaaaaaaaatatggtaagatcatcgcaattaatcacgtctgagagcatcctatcctatgaatgaagagaaattgctcgctcaggcagaaaagatctgccagaaacgaggtgttcgcctgacttcacaacgtctggcagtattgcgtctgatcatgcaacaacctaccgcaatcagcgcttatgatttattagatttattacgccaagtagagcctcaagctaaaccacctaccgtatatcgtggattggaatttctacttgaacaaggttttattcacaaaatagaatccaccaatagctatgtgctttgtcatcattttgatgatgctgagcatacatcggtgatgttaatttgtgatcgttgcttatcagtcacagaaaaaagtagccataaaattgaaggggcgatcaccacactcgctaaagataatggctttcatttacgccatagtgtgattgaaattcatgggctgtgcgctcagtgccatgaagcccaagcctgtacacatccggaaggttgtcaccatgatcatagtatggatgataatcttaagcagaaaaaaaccggtgactataagcctcgttaagcagataaaagataaaagtcagcggaacatatgtttttttgtataaattaaaaacagaaaatgcagatgattttatgtttttacacatcatctgcatctttttgacgttctccccgccctgatgaactggaggacgaggtttcggcgcatctggtacaataatttgtattgaatgaattagatacaaattacagccattcgccgttacggataacccctactgctaatccttccacagtaaagctctgctcacgtaaatcaacgataataggtgaaaactctggattttctgcgtgcagttctatcttactaccgactttcttaaatcgttttacagttacttcatcttcaatacgtgcgacaatcacttggccattatggacatcttgtgttttatgcacagcaagtagatcgccatccataataccgatatctttcatcgacataccattaacacgcagtaaaaaatctgcgctcggtttaaaaagcataggatcaacttgataatggctttcgatatgctcttgcgctaaaagtggttcaccggctgcaactcgtccaattaatggtaagccttcaggctcttcttcaagtagcaaacggatacctctagatgcaccagagacaatttctatcacgcctttgcgagcaagtgcttttaaatgctcttctgccgcattaggtgagcgaaaaccaagttgggaagcgatttccgcccgtgttggtggcatacccgtttgcgaaatgtgatcacgaaccaaatcgtaaacctgctgctgccttgcagttaatgctttcattccgccccctgtttgtttatacagtcagactgtgagtatatacaggtatatgccgattgggaactacaaatgcatataaaacacgcatctttgcattatttttcgacaattgtcgattttttttactttatgcaaaaaaatgatgccaaagaatggttccccaagtaaataatcccaatataatagcgacgagaacggcagctgatcccatatcctttgctcgtcctgataattcatgacgttctgtaccaatgcgatcgacgacagcttctatagcactattgaccagttctaaaataacgacaaggacgactgaaccaatcaataaaatgcgctctagaacactgacatcgataaaaaatgcaaggataattgctattaaggtcacaatagcttcttgtctaaaagcggcttcattgatccaagcggcgcgtaagccctgatatgaatagccaccagctttaatgattcgggtaagacctttattttgattagccataataaactctatcgaaaacaaacgattattttgccacttttctctattaatattgtcacagcaccacagatctacgaaagactttctgttatgctttcgaagtattgctaataagaggctacaactatttatgtcagcttggcgtaaactatattataacacattgaatttaccactgaaattgttggtaaaaagtaaacgagttccgactgatcctatcactgagttaggcttagatacgtcgcgatctttcctttatgttctgccttatcactctaaagcagacttactgacattacgtcagcaatgtttatctcttggcttgccagatcctctgcaacccatagaaattaacggaaccaaactgccagcctacgtctttattgacgatggtcctagagtattccgttactactctcccgatccgcgtaaagattcagtgaaaacattccatgcttatcttgatgctcatcgtaacaatccgcatcttgatattgaaatgttacctgcttcagtgatgttcggtcgctcaccgggtcgagaaggtcataatggtgtcccccatttgcgcttattaaatgggatccaaaaatttattgccatcctctggctaggtcgagatagttttgtccgtttctcgccgaccgtatccatgcgccaaatggcgaatgaacatggaaccgataccagcattgctcgaaaacttgcgcgtgtggcacgtattcacttttcacgtcagcgtttagcagcagttggcccaaaactacctgcacgccaagatctcttcaataaactattggcatccaaagccattgaaaaagccattgaagatgaagcaaaagcgaaaaaaattacgcttgataaagcacgtaaaaatgccactgatatcatggaagagatcgccgctaatttctcttatgaagcggtacgaatgactgatcgtgtattaagctggacatggaataagctctatcaaggtatcaacgtttttaatgcagaacgtgtgcgccaacttgcgcaagatggacatgaaattgtctacgtaccttgtcaccgtagtcatatggactacttattgctttcctatgtactttatcatcaaggattggttcccccacatattgctgcgggtattaaccttaatttctggccagcaggaccgattttccgccatttaggggctttctttattcgtcgaacctttaaaggaaataaactttattcaaccatcttccgggaatatttaggtgaattattctctcgaggctactctattgaatattttgttgaaggtggacgctcccgtacaggtcgactgttagatcctaaaacagggacgctgtcaatgaccgtgcaagccatgttacgtggtgagacacgccctatttccatcgttcccatttatattggctatgagcatgtcatggaagttgccacttatgccaaagagttgcgtggtgcgacaaaagagaaagaaggttttatgcagatgatcagaggattgcgtaaactacgtaaccttggtcaaggctatgtcaattttggtgaacctatttcgctatcacaataccttaatcaggcagtgcctgactggcgcgatgatattgatcccattgagccacaacgtccaagctggttaaatcctgcagttagtgcgttagcggataatattatggtcaatattaataatgccgcttcgattaatgcgattaaccttgtctctacggcgttgctagcgtcccgtcagcgagcattaactaaagaacaattattagagcaaatagattgttatctacagttactgcgtaatgtgccttactcatcagatatggttgtccccgataaaagctcagaaacattattagcacacgccttgcaaacagataaattccaagttgagcaggatagtcttggtgatattattatattgcctcgtgaaagtgccgtattgatgacttattatcgcaataacaccattcacttaatggttacaccatcattaattgcgagcattgtcttgcatcacgagcgtatacaccgtgatgacttaatgaaacaggtagaattaattttccctcttatcaaagctgagttgtttattcgctatgaaaaagaggagttacctgatgtggttaatacactgattagtgagctttgtcgccaacgtctaatttgctgtgctgatgatggcatattacggatcaatccagcacgtattcgcccattacagcttttagcagcaagtgttagagaaacgctacagcgttatggtattacgctctctctactcaattttgctcctgaaattagccgtgcactattagaaagagaaagccgcattttggcgcaacgactttctgtattgcatggtattaacgcacctgagttctttgataaagcggttttctccactttagtttctacactgcgtgaagaaggttatctcaaagataatgaagatatcctcaaagcagatgcctctgcactttaccaagttattgcgaaattaatgtcaccagaaattcgtttaaccattgagagtgtaggcgttactgaagataacaattcagcacaagcgattgaggaaaaccctgaatccaacatggataagtagttgcttaatagcaaatcgcgctataatcagtaatagaaaagggataagcaattggcttatcccttttatttttatgcaacttcagtgctcagctagtgctggtaatatatttattagaaataattaaataaaatacctgcgaataaaacaaaaccgacataattattattcataaacgcttgaaaacaaggggctctttcccgttcagcaattaatttctgttgataaataaacagggctgtcacgagtaacaatgaccaataatagatccctttcatattcagcaaaacgccaatcgccactaataatgccaacatcactaactgtaaaataccaataatgattttatcgtaacgaccaaacagaatggctgtcgatttcacccctatttttaaatcatcattgcgatcgaccatggcatattgagtgtcatacacaacagaccagataatattgaccaaaaagagtaaccaacatactaaaggtagtgtttcagaaactgcagcaaatcccatagggatagaccaaccaaaggccatacctaaaattaattgaggcaaattactaaaacgttttacaaaaggataaaaccatgcgagtgcaagtgcggcaatagataaccaaatggtcatggtatttaacgtaagcactaatccaaacgaaaacagcaccaagacaataaagataatcttgctctctttctccgttacagcaccactaggtaatggtctatttttagttctttcaacgttgccatcaatttttctgtcagcaaagtcatttattacacacccagcggcacgcatggaaaacacacctagagtaaatacaatcaggatatgccagtcaggaaagcctttagcggcgatccataatgcccaatacgttggccaaagtaataatagcgctccaataggcttatctatacgcattaaacggctatacgcctgccatttattgtgcgtcatacttccctccaattttagctccccctaactactgcttatatacaggtgatgcaggcaaaaacacctcagttaataataaaggtttatctgaaagctggaaacgggaacgacgtaaccaatgtccattttgttgcccaatatgaataaaatcacgacttaaggttgtttcctggaacagataacgtcctaatggcaccgtacgcaaattcactaattggcgatcttcacccgttaatgtctcttccggcactaatgttcgccctaataaccaaggtacattatccccacaaaggacgatttctcttagccaatagcgtcggctataaggtaaacacttttgttcatcagcaggctcgatatattcaataaaaccttcttgatatggcattaccgtcacttgatggcaatgttgctcaaaacgtcgtgtcattgaacctaattccagcagccaacttaaggtattttctgcgacttcttcacgctcttcatctgataaccagtgaataggtgcgtgagtaattatggattttttaaacattctttcatcatcacaactatgatgatcctaactttataaatcattatgcactaaggatatcatgatgtagcgataggaagttaaaagctgataacatttcgtataaataatctaaaaaaacgttaaaagataatcagaattcactcaaattgagaaaaaacaaaggaggtcaccatcaacctccttggttataagcgcttaatcacacttaatttattctcttaacgccatgctttgtaacgattaattaaattatttgttgaactatcatgactgttaacactttccttaccttttaactctggcaatatgcgattagctaattgtttgcccaactcaacgccccattggtcaaaggtgaagatattgaaaattacaccttgtacaaagattttatgttcatacatcgcaattaacgcgcctaatgaatagggagtgatctcttttaaaagaatggagttggtgggacgattcccttcaaacactttaaatggtgccacataccccatggttgcaggatcttttcctgctgaggcaaactctgcatcgacttgctcacgagttttaccaaatgctaatgcttcggtttgtgcaaagaagttcgacattagttttgcatgatgatcagataatggattatggctgatcgctggtgcaataaaatcacaagggatcagtttggttccttgatgaattaattgataaaacgcatgctggccattagtccccggctctccccaaataataggtccggtttggtaactgactttgtttccatcacggtcgatatatttaccattggattccatattaccttgttggaagtaagcagcaaaacggtgcatatattgatcgtatggcagaatcgcttcagtttcggtaccaaaaaaattgttataccaaatgccaataagcgccaatatcatcggaatattattttcagcttcagtggttctaaagtgattatccatagcatgagcaccagacagtaactgctcaaagttgtcataaccaatagataatacaatggataaaccaattgctgaccataatgagtagcggccaccaacccaatcccaaaactcaaacatatttgcggtatcaataccaaatttttctacttcagcactattagttgataacgcaacaaagtgtttcgcgacaaaagcactctctttagccgcagataagaaccaatctcttgcagagtgtgcattagtcatggtttcttgtgtggtaaaggtttttgaagcaatcaagaatagcgttgtttctggatcgcattttttcaaggtttctgcaatatgtgtaccatcaacattagaaacaaaatgcatggtcaagtggtttttataagggcgcagtgcttctgtcaccatatacgggcctaaatcagaaccaccaataccgatattgaccacatcagtaatcgctttacctgtgtaacctttccattcaccactaatcacacgctcactaaatactttcattttatgcaatacagcattgacttctggcatcacatctttgccatcgaccataaccggtgtattgctacggttgcgtaatgcggtgtggagtaccgcacgatcttccgtacagttgattttttcaccgctaaacatgctctttatcgcaccagcaacatcacactctttagccagagcctgtaatttatctaatgtttcttgggtgatacggttttttgaaaaatcgactagaatttggtctgaaaacgttcttgaaaaggtgttaaagcgtgatggatcttgagagaacagtgttttcatttctgtatctttcatcacggcaaaatggtcttctaatgccttccaagctaaggtatgagttgggtttacatttttcattcacaatactctcttaagattacaatccgatactctcagattgtagcctgtcatttaatagttacggtcaattctttcttatttgatgatattcgtcaaaaccattcaacaaatctagtattaattacttacataggcaaaaccgataatctttgagtgattattaattaaattgattatccttcactcttgattgactcttttggcaataaccgatattcctaactgtgtttaacatctcactgggactaaaggaatacaacaatgaaagataatactgcaacaccttcatcaccttttactatcgccaaatttggtggcactagcgtggcaaattttgcggcgatggaaaagtgtgcagatattatcttaaaacagaaatcagtccgtgtggtggttctttctgcttcagcggggatcaccaatttacttatcgaacttgcgacaggtgttgacgcaacacaacgagccgctttattggctcaagttcgtgatattgaatacgccatcatcaatcaactatcacaagcagaaattatttctcaagaaataaaccgcttattggacaatattgaaatgctgtcagaagcggcagccttggcaacttctgatgcgttaaccgatgagttagtcagccacggtgaattgatgtcaacgttattgtttgttgaactgttacgtgaaaaaggaataagtgcagattggtttgatgtcagaaaagtaatgaaaaccaacgatctgttttgtcatgctgagccagatatggcgcaattaactgagttaacacaaagtttaattcagccccgcttaacagaaaccgtgattgttacccaaggttttatcggacaagagcctaaaggaaaaaccaccaccttaggacgtggcggaagtgattatactgcggcactgattggtgaagcattagggatgtcacgtgtcgatatttggactgatgtacctggtatttatagcactgatccaagaatagtcccacaagcacatcgtattgatcatattgcctttgatgaagcggctgaaatggcaacctttggtgctaaaattctccatcccgcaacgttattacctgcagtgcgtagtggcattcctgtgtttgtcggctcaagcaaagcaccagaagaaggtggtacattggtttgtgcacaaactgataatcctcctgtgtttcgtgccattgcactacgtagaaaccagacactacttaccctgcatagtttgaaaatgcttcatgcccgtggttttttggcagaaatatttaccattttatcacgccaccatatttcggttgatgtgataaccacatcagaagtcagtattgctttaacattggataccacaggtaccactagctcatcaggcagtctgttaactaatgctttattaacagaattatccgcattatgtcgcgtggaagtagaagaagatctggcattggtcgctatcattggtaattcactatcgcaagtaaatggcttaggaagccagatttttggcactttagaggattataatattagaatgataagtcatggtgcgagtacccataacttatgtttattagtggatggcaaagatgcagataatattgtcagaaaactacacgacaccttattttaacttattacttagtaaatatttatagaataaatataaacaacataagattaagatatggaaatagaataacaacatttcaatgactttagaatttaacataggcttcttgcaataaggagcctatgttatttatttttacagtaaaaatgacttatatttaaaattattatatttaaaaataatatagagtatttttaatttattttatcatctttaagagggagttatgtctataaaattaagctatgatatttgtaaaactgtccaatatatgcatgtgaacgttataaataagagtaaaaaattaaaagaactacgaaatgaaataaaatcactatataatctatcacaaccttttcaaaattcatgtgttaatactcatactttttataaaccacaaaatagcatcacagcctcaatagcaaatatcaataatagaattaataaaaatcaacacgcacttacaggaatagaatcaaaattaaaagaaaaatacaatgatataaaatcaattaatgatttaattaaaaatagatataaatcaggtttagttacaaatgagcatgactataaaaacatgaaaaatgttttaacaaacaattttaaaagtgaaataaatgatttaaatcaacaaaaagaaatactaaaaattagattaaatgaaaatgaaaatacacttgcatattttaacaataaatcagattttctttcatatcctaatcaagaaactctcaattttttgttctatactgaagttttccccaacagaatcgaaagagaatcaataccaaaagaaaaaatcaatattgattgtatcaacaatatgataaacatccataaaaagagtttgtttatcagttcagagaacaaagaaaaaataaacacatataaagaatttttaaaaaaataaatatacctttctaacaatatccaaccctattacagtattaacgtaagcggatgcctttcgatagaaagatccgctttttattttttaataaactcgataaccaccatattttttagcaaattgattaaatttaccaaaatcaatcaacgcgatttctaacgagcgataggcaatatgagacatcttagccacttgttccacaaatacatggttatcttcaagaagcttagctgtaagtgctgaggcaataatctcacactctttcggtgtcacaatccaaccatcatttgtagcaaacttataaattggaatacacccttctttttcactctctttagctaacaatgcctcttcttcttgcatagcttgcttaaatagtgtgatctcttcttctaggggggctggatgtgtaggaatatgatgataaatatagtcaccaatttcttccatgcgcgccggtgtcatttcagccttaagccaaatcttatcaaacattttttcatctaataatgcatctgtatccaaattccctgttaattgcatcagatttaaaaacgcattaatgataacttcatttaatgggtaatttcctttggctaaagaaggaaaaggaactttagtgccaactgttggggtttgctgaagatacaaagtataactcatcatcatgtccttttttctgatacaggcttacagcttatacatctttaatgggaactgcgagagaaaataacaaggggatatgattatcaccttgttatttattacattattataatcttcagataccgtttaattaaggctcatagcctaaattaggggctaaccaacgttccacttcacttatactcataccacgacgtttggcgtaatcttctacctgatctttttgaatttgagcgacggcaaaatatttactttcaggatgactaaaataccaacccgataccgaagcccccggccacatcgcataagcatcagtaagcttcataccaatgcgattttctacatttaacagttgccaaatttttgctttttctgtgtgctctgggcaagctggatatcccggtgcaggtcgtgttccttgatatttttctctaatcaactcgtcattagagagcgcttcgtcaggactgtaaccccaaatcttggttctcacttgttgatgcaaatattcggcaaaagcttctgcaagacgatcggatagcgcttttaccataattttattgtaatcatcatgagcattatcatacccattagcgagtgcatcttcttctagaccgccggtaactgcaaaagcaccaaaatagtcagcaagaccactatccacaggggcaataaagtctgctaagcaatagttagggtactcttttttttctgtttgttggcgtaaatgacaacaacgtaatagctcatgctgtcgcgtttcatcttggtaaataataatgtcatcaccaaggcgattagcagggaataaaccaacgatacctttcggagtcagtaatttttcacgactgagtttatccaacatggcattcgcatctgcaaaaacgcgtcttgcctcttctccgacaacctcatcttctaatatacgtggatatttccccgccaatgaccaagtcataaagaaaggtgtccagtcgatatacttacgtaaagtttcaatattggctgtaacttgttgtacccctaattggttcggcttaggtggcgtatagtgttgccagtcaagctgcaatgcattggcacgagctgtcgctaaggaaacgggaggcgtacgcggtttttttctcgcatactgctgacgtaccacttcatattcatggcgtgttttagcgacaaaatcagccttttgtgtggccgataataatgcagcgaccaccccgaccgttcttgacgcattctgcacataaacggttgggtggctgtaattaggttcaatttttactgccgtgtgcgctttcgatgttgtcgcaccaccaatcattaaaggaagagaaaaaccgcgtctttccatctccttagcaacattcaccatctcatccagtgatggagtgatcaatccagacaatccaataatatcaacattttcgtcaatggctgtttgcaagattttatcgcaaggtaccatgacccccagatcgataatttcatagttattacattgcaacaccactccgacaatatttttgccaatgtcgtggacatctccctttactgtcgccagtaacacttttcctgccgagctgcctgctttttttgtcgcttgaatataaggttcaaggtaagctacggcctgtttcatcacccgtgccgattttactacttggggtaaaaacattttaccttcaccaaacagatcgcccactgtgttcatgccattcattaatggcccttctatcacttcgataggactcgaagcttgttggcggcacgcttcggtatcttcaatgataaattcggtgatccctttcactaacgcgtactctaggcgcttttcgacctcccattgtcgccattgcgcaagcgtagagtgctgttcctcacttttagtaccacgataacgctctgcgagtgccagtaaattatcagtactctctgcatggcgatttaaaataacatcctctaccgcattacgtagttcatccggtaatgagtcataaatagcgagctgcccagcattgacaatccccatatccataccattttttacagcgtaatagagaaaaacggagtggatagcttcccgaacgggatcattgccccgaaaagagaatgacacattagaaacaccgccagaaattaaagcataaggcagttgagatttaatatccgcacaaacttctataaaatcaactgcataattattatgttcagcaatacccgttgctacagcaaaaatattgggatcaaaaataatatcttctggtggaaatccagctttttcagttaatagataatacgcacgccgacaaatttttatttttcgctctcgagtatctgcttgccctatttcatcaaacgccatcacgacaaccgcagcaccatacttacgaactaattttgcatgctcaataaaaagggcttccccttctttcatcgaaatcgaattgactattcccttaccctgaatacatttcaatccttcctcaatgacttgccattttgacgaatcaatcataatcgggactttggcaatatcgggttcacccgcaataagattaagaaaacgtgtcattgcttctatcgcatctaacatgccttcatccatattgatatcgatgatttgagcaccgttttcaacttgctgacgagcaacatcaagggcttcttggtaattaccttcttttattaaacgtttaaatttagccgaacctgtcacattcgttcgttcccccacattgacgaacagcgaattatcatcaatgaccaaaggctcaagacctgagagtcgacaggcttttttaatgacaggtaatgttctaggtgctatgccatcaaccgcttgagcaatagcctgaatatgggcaggggttgtgccacaacaaccaccgacaatattaagaaacccagcttgcgcccactccttgatttgttccgccatctcattggcatctaaatcatatccgccaaaggcattaggtaagccagcattagggtgagcactgacataagtttctgatatttgggagagagtttgaatatattggcgtaattcttttggccctagcgcacaatttaaaccaaatgataacgcgtcggcatgacgtagtgagtgataaaaggcttctgtggtttgccctgttaatgttctacctgacgcatcagtgatagtccctgagatcatcaccggtaattcaatattaagattatcaaactcacatttaatcgcaaaaatagccgctttagcatttagggtgtcaaaaatggtttccaccataattaaatccacccctcctttaatgagtccgcagatcgcctctcgataagccatcaccaatgtatcaaatgagatattacgaaacgcgggatcgttaacatccggagaaatggatgctgttctattggttggccctaatacccctgcaacataacgtggtttatctggcgttaatgcactccatttatcagcacaggctctggcaagtttagcagcctcttcattcaattctgcacataacccttccatctgataatcagccatggcaatagaggttgcattaaaggtgtttgtttccacgatatctgcaccggcttcaaaataagcattatgaatttcagtaatgatctgcggctgcgtcaagactaaaaggtcattattccctttaacatcacattgccaatgggcaaaacgttcacctcggtaatcttcttctgccagctgatattgctggatcatggttcccattgcgccatcaaggactaagatacgtttggctaatgcttgcgtaagctgctgagttatcatggtcacattgcttcctctaccaaagaatattgtgttgttgttattttcgttatatagcaagttcgttgtttttttatcctatcatatctctttgcaaagattcctaagaggaatatgagagattttcacctaaccataacccgataacatcaatatttgttttcatatgctttgttttgaaaaatatacagatcagaggagttttattacgttatataggtcataatagaggataatatggacagtatttctggagtgtaagtatgaccgtcttccctaccaataaaaaagctcgtaagccaaaaacacccgcaactcaaagtactgcacaaggtggccccgttcagtcattaagccgtggcttaacattattggaatatatttccgaatctccaggcggtattgctttaactgatttagcttttcaagcaggactacccaattccactactcaccgcttacttactactttgcaacaacatggttttgtacgccaagtaggtgatttaggtttatgggtagtgggcactcatgcctttattgtcggtagtagctttctgcaaacccgtaacctactggttatggtgcaccctatattgcgtcaattaatggaagattctggtgaaaccgttaatttggctattcttgatcaagttgaatttgatgcggtgattgtcgaccaagtacaatgtaatgcattaatgagaatgtctgccccaattggcggcaagttgccaatgcatgcatctggtgcaggtaaagcatttctatccactttaccggaaaataagttactcccccttttacagaaaaaaggtctgatggcctataccccttataccaaaaccttaccttccgcattaaaagagaatttagaacaagctcgtaaacaaggtttctcttttgatgatgaagagcatgcattaggtttacgttgtattggcgcttgtatctatgatgaacaccaccagccttttgccgctatttcactctctggccccgtatctagaatgacagattcacgcattacggaattaggtgcactggtgataaaagcggctaagcagatcagccgtgaatatggtggtgtaaaaagttaacccagctaggcctttctatttatttatgtacaaattaggaaggcttctccttaaataaaacgattcagcttatgcaaaaatcgttttttttcatttttagccgttaaatattaaaaaactgttacttatcatcttaaaaaattgatatcgatcacagatgttgtttaagcttggtttaagagtattgcaactgagcttgttacccgtaacaatgttaccggtaacaagttattgctaagcgcttatattttttcttatagcaataagtaatgccgtcaccctgtgtgaataaaggaagcactattatgaacccgaaaaatcatgaccagtttcagaacaacttcgccgcattaaacgaaaccgtacaacaagtgactgaacgtattgttgctcgctcacaaataactcgtcgcgcttatctgaaaaaaattgaagctgctaaaagccaaaccgtacaccgtgcccagttagcttgcggtaatttggctcatggttttgccgcctgtcaaagtgaagataaaaatttacttaagaatatggttcataatgatatcgccatcattactgcgtataacgatatgttatccgctcataaaccttatgaagattatccacaaaaaattaaagcggcattgcatactgttggtgctgtaggtcaagtcgctggtggtgtgcctgcgatgtgtgatggtgtgacacaagggcaagatggaatggagctatcactgctaagtcgcgatgttattgccatgtctgcagctgtagggttatctcataatatgtttgatggcgccctttatttagggatctgcgataaaatcgttccagggcttactatggcagcactgtcattcggtcatctgcctgcaatttttgtccctgcaggtccaatgaccagtggtttacccaataaagaaaaggtgcgtattcgccaactgtatgcagaaggcaaggtcgatcgtaatgctttattagaagcagaagcagcctcttaccatagtatgggaacttgtactttttatggtacagcaaactccaatcaaatggtgatggaggcaatgggcttacatttacctggctcctcttttgttcacccagatactccattacgtgaagcattaacagaagcggcagcaaaacaaattgtacgcttaacagaaaactcggggaattatttacctattggtcaattagttgacgaaaaggtgattgttaacggtattattgtgctgttagccacaggtggctcaacaaatctcaccatgcatttagtggcaatggcacgggcggcgggcattatgattaattgggatgatttttctcaattatcacaagttgtgccattaattgctcgtatttatcctaatggtccggcagatattaaccaattccaagcggcaggtggtcttgctcttattattcgtgaattactgaaaaaaggcttaattcatcgcgatgtcaatacggtggcaggatttggtattgaacgctataccttagagccgtggctaaatgaaggtaaacttgattggcgtgaaggtgcaatacaatctttagataaagatgtgattgccgatatcaatacgccattctcttcacacggcggaacacaggtgatggaaggtaatttaggtcgagcagtgatgaaaacgtcggcggtgcctgatgaaaataaaattattgaagcacctgctgttgtgtttaatagccaacatgatattgccgctaaatttagcgccggtgaattgaataaagattgtgtagtcgttgtgcgttatcaaggtccccaagccaatgggatgccagaattacataaactcatgcctcctttaggggtattgatggataaaggctataaagtggcattagtcacagatggccgtctttctggtgcatcaggtaaagttcctgccgctattcatgtaacaccagaggcggtaaacggtggactattagcaaaagtacaagatggtgacattattcgtgttaatggcaaaacaggtgaattaacactcttagttgatgaacaaaccttagaagctcgccaaaccgaaatacctgatctcagcgcaaacaatagcggttgcggtcgtgagttgttcgttaatttacgtcgccatttatcaggtgctgaacaaggtgcttgctgtattgatttttaatacataaagttttcattgcctaatgaggagcaagcctatttatttgctcttcattatttctgattaggaaagataaagatgaatcattggaatacaagtgcagagtctgtactaaaatcagggcccgttgttcctgttattgttattaatcatattgaagaagctgtacctgtcgcaaaagcgttagtcgccggtggcgtaaaagttttagaagtgacactacgtacagactgcgctattgaagctattcgtcgtattgctaaagaagtaccagaagccattgttggtgcagggacagtgatcaaccctcaacaattagcccaagtcacagaagcgggtgcacaatttgccattagcccaggcttaaccgatgcgctattaaaagctgcggtagcaggctctattcctcttatccctggtatctcgactgtttctgaattaatgctcggtatgagttacggtttaaatgaatttaagtttttcccagcagaagctaatggtggcgttaaagcattaaaagcaattgcagggccattctcacaagtacgtttctgcccaactggcggtatttcgcctgaaaactaccgtaactaccttgcactggaaagtgtactttgtatcggtggctcttggttagttccaagtgatgccgtgaaagcaggagattatcaacgtattactgagctagcaaaagaagctgttgctggcgctcaacattaatttaatgctttaattattacccaataaagataggtatatcattcgattatctatctttattactctgttttattaacagatatcgttatcaataaaacgtttactttgtggataggcgtaaacatcttcaatatacccttgtttaattctttgctgctgttgttgccagtattcaggtgaaagaagatcacgatgttgagcttcaaaataatgacatacttgcttatcacaacataaaaagtaacgaaactcttcaggaaaaacatcattttcagcaacgctataccaaggctcactggccagttcatcttcaggatagcgagagggaggaatagcacggaaattcatatctgtcatataacttatttcatcataatcataaaaaataactcgatgatgacgtgtcacgccaaaattcttaaataacatatcaccaggaaaaatatttgcggcaatcaactctttaagtgcttggccataatcttcaaccacggcttttaactgtttatcgtcacactgctccatatagatattaagtggcgtcatacggcgttccatatacagatggctgatcagtaacttatcacctagatcttctaatttgttggggatctcctgttctaagatcgccattaagtcgttactgatccgctttttatcaataacaaagttctcaaactcttgcgtatccgccattctcccaacacgatcatgctctttcaccaagcgatagcactctttgacacgctctgcagtcattgttttttgtggcgcaaacctatctttgatcactttaaacactctatcgtaagtaggcagtgtgaaaacgagcatcaccattccttttacccccggagcttcaataaattgttccgatgaaaaattcataaaagcaaggtattcacggtaatattcagttttgccatgtttctgacaaccaatcgacatatagagctcagcaatagacttttcagggagaatatcccgtaaccatgttactaatgccgcgggaaatggcgcataaaccataaaataagaacgagcaaagccaaatacaatactggcttcatctgttgtcgttaaacaggtatcaataactaagtgctgttcaatattatgaataggtaataacaggggaatgaattgattatttatcgctatcttaccaatcatccatgccgctttattacggtaaaatagctcattagcaatgtgaaataccgcattttgtaattcctcatggctaaattgcgcatagagcgtttggcaaataaattgaatatctcgcgatttattttgccacggtaaacgcaaaggtaggcgcgataaaatatcttgcaataatgcgggtaaatcactttgtataacaaacgttcttgataaagggcgaggggcttgcgcaaaacgatacgcaggttgtgatgaaaaaacgaataagttttttttattaagctctcgatgatgaaatagacgacaatagactgaattaaaaaaactttcagcaatttcaaaacggggatagttaggtaataattgtgtgtatcgctctttgactttttgtaagaaaacactttctttatcaatatcatgtcggatacatctaagttgttccacaactaatccaacatgattatcgtataagcggatgcgctctttcatcgccaattgaataccatgccaatctgcttgctcaaaacgatattgagcacctgacgttatctcaagaaaacgcccatattgtgcatcaaagccttgtaagatcgtttgagcgactaagtcttcagctgtcatcaactgacctcatgaaaaagaggagcatcctgctcctgaattatcaccacaaaagtgcatcacagtaaggactagaattgttgctcttcagtagagccagttaatgccgtaacagatgacataccaccttgaataatcgtcgtcactttatcaaaatagccggtgcccacttcttgttgatgagatgagaaggtgtagcctttcgatagtgcagcaaattctttttcttgtaccttttcaacatagtgtttcataccttcacctttagcgtaatcatgcgctaaatcgaacatattgaaccacatactatgaatacccgctaaagtgataaactggaatttataccccatcgcagaaagctcatcttggaaatgggcgatcgtgctatcgtcaagattctttttccagttaaaagatggagagcaattatacgctaacattttaccgggatatttatcatggatcgcttcggcaaatttagccgccattttcagatctggcgtggaagtctcacaccagaccaaatcggcataaggggcataagcaagccctcgactaatggcttgctcaattcctgcatgagtacagaaaaaaccttcagcggtacgctcaccagttaaaaatgaactatcgtaaggatcgcaatctgaagttaagagatcggccgcatccgcatcagttctggcaaccaataaggtaggaacatccgaaacatctgccgctaaacgtgctgccaccagcttttgcacagcctcttgcgtaggtactaagacttttccgcccatatgaccgcattttttcactgcggctaactgatcttcaaagtgaacgcctgctgcacccgcctcaatcattgctttcattaattcaaatgcgttaagtacaccaccaaaacccgcttctgcatcagcaacaataggaaggaaaaaatcaatataatctttatgctgagggccgataccatttgaccactgaatttgatcagctcgtctaaacgtattattaatacgctgaacaacattgggtacagagtccaccgggtataaagattgatcagggtacatactggcagcagtattcgcatcagccgccacttgccaaccagatagataaatggcttctaatcccgctttagcttgctgtaatgcttgccctcctgttaaagcacctaatgcattgacatatcccttcttcgacttaccatttaatgatgaccaaagccgttgcgcaccacgtcttgctaaggtatgttcagggttaacggaacctcgtaatttaatgacatcttctgcgctataaggacgtttgatccctttccagcgaggttgttcccactctttttctaattgggcaatctgctctgatctactcatagacataaaataactcctataaatctggtagtgatgatgttttatatttgcagtttataaatacgttatgacgtatcttttttaatttaaaagttgataacccggtaaagtcagaaaatcgactaattcatcttgggtagtaatgttatccattaaggtcgctgcttctttaaaacgaccttgctcaaagcgggtatcacccacttcttggcgaattacctccagctcttctttcaacatgttgcgaaaaagcgcttttgttacaatctgtccatccgataatggtttttgatgacggatccattgccaaatagaggttcgagatatctctgccgtggcggcatcttccattagcccataaataggcacacaaccattacctgagatccacgcttcaatatattgcacagcaacacggatattcgctctcattcctgttgctgttctttcaccttcacaaggggccaataacatttctgcggtgatcttttcatgacgttgtacatcaagttggtttgctcgctctcctaataccgcatcaaacgcagataacaccgtttcggctaatccagggtgagctatccaagtaccatcatgaccattagttgcttcaagctctttatcctcaaataccttttgtaaaatgacaccattttgctccgcagagcgactggggataaaagcagacattcctcccatcgcaaatgcaccacgtttatgacaagtttgaataagtagtcgggaataagcacttaagaaaggttgagtcatagtaataccctgtctatccggtaacacacgatcagggtaattcttcaacgttttgatatagctaaagatataatcccaacgtccacaattaaggcccacaatatgctctttcatatggaataagatctcttccatttgaaataccgcaggtaaagtttcaattaatactgtggctttaatagttccgctggctaaaccgaagcgtttttcagtgaaatgaaaaacatcactccaccattttgcctcttgccaagtttgtaatttaggaatgtaaaaataaggcccgctgccctttgcctgtaatgttttatagttatggtaaaaatataaggcaaaatcaaacaagcacccaggaataggttttccctgccatagcacatgcttctctggcaagtgtaatcccctgactcgagcaattaacaccgcaggcgatgcttttagttgatagcacttaccttgttcattggtgtaggaaattgttcctttgacagcatcacgtaaattaatttggccatcaataaccttatcccatgtcggggcaagtgaatcctcaaaatctgccataaatacttttacattagcatttaatgcattgatcaccattttacgatctacggggcctgtaatttcgacccgacgatcttgcaagtctttaggaattggattcactttccattctgagtttataatggaatctgattctgaaataaaatcaggaagcattccattatccactttttgtttccaaatttctctttctgctaataaggtgtcacgacgttctgaaaactgactgaccaaattagtcaaaaatgactcaacatcatgatttaatatctctttttcagctatcccaaaaggttttgtgaagcttaatgcttctgtagttaatgattgtgacattctgcattcccctaaaatcttttacacacctgattaagattaatgcagtttttacaaaaatcaaaaatgaattccatttttatttaaacattttttaacaatgtgattacaccaatgttttttggctgaataaaaatggctatttcaaaaataactcgagtgatcttggtttgttgaatgattaaacaaactaagatcatgcgaagatcacataaagctcggcttataacatttacttatatgaatattcttcatatacagcatctacacctcgacttttagatctgaattggctaaattcaggcttctagatgtctagatgtttttttagaggttattgagatgccaatcagagtaccagacgaactacccgcagtgagttgtttacgcaatgagaatgtctttgtcatgacatcaagtagagcgagtattcaagatattcgtcctttaaaagtactgttactcaatctgatgcccaaaaaaatagaaacagaaaatcaatttctacgattgctctctaatagtccattacaaattgatatccaattattgcgtattgattctcgtgttcccaaaaatacacctgttgagcatcttgatactttttattgtgattttgcccaaattaaagaacagaattttgatggcttgattgtaacgggagcaccattaggtttagttgaatttgaagatgtggcttattgggaggaaataaaagaaatcattacatgggcaaaagagcatgttacttcaacactttttatttgctgggccgctcaagcgggcctaaatattttatatgacttacctaaatataccttaaaacaaaaaatttctggggtatatcgtcatacaacatgtgatcctttcgcgttactgactcgtgggtttgatgaaacattctttgcccctcattcacgttatgctggttttcctgttgagtttattcaacaaaatacagatttagaaatattagcaacatcagagcaagcaggggcttacctattcgcatctaaagataaacgtgttgtctttgccacaggtcacccagaatacgatcccaatacattagctgacgaatatcatcgtgatgttaaagctggattagcaccacaactacctgaaaattattttcccgataataatcctaataaaaaacctcttgtatcttggcgtagtcatggccatttactctttgcaaattggctaaattattatgtttatcaaattacaccatttgatctggcacagatgaacccaactttagattaaaataaaaccccaaattcaatttatttggggttttatattcaaaaaaaatacttgagattatttatagcgatgcgctaatgcattcgctgcaatcattgcgttgtagacatcttcttcagtcactttcataggcatattgcccatggtatcaccttctgcacaagcaattttcgctacattacgccattcactttcaataaactctttcattcccatatcttcaagcgttaatggcaattcagccgctttgataatacgaataacttcatcaatttcttcttgtggcgcattttctaacactaattgtgttaataatccaaataccactttttcaccatgttgcacatgatgtaaggaagcaactgcagacataccattattgaccgcatgagcggctgctaaaccacctgcttcagcccccacaccacttaaataaatagtcgcttcaatagtttgctctaaagcttgtgtggtaattttatggcgcacagcatccattgctttatcaatattttcactcaatatttcaaaacacaattgtgctagacctaaacctgtacgtgatggacgttgattaactaaattaagtccatcagcttgatagcaagcacgtgcttcaaaataagtggctaaagcatcaccgacacctgcagagaagaagcgttgtggtgcagaagcaataatcgcggtatccgcaatcaccatatcagggttctgaggtaaaaataagtatttatcaaattcaccattttctttataaagaacagaaagagccgtacaaggcgcatctgtagaagcaatcgttgggaataaaataacagggaggtgatgataataagcaaccgctttagatacgtctaatgttttaccgccaccgataccgataataacattcgctttattttcaacaacaattttacccaagcgatccacttcagcttctgtacattcgtaattaaatttttcaacgaaaccagatagcccattttctttaattgacgacaaagcttctttatttactttttctaggaaaaattcatcgctgataataaaagcattatctccgaaatctttcatataattaccaacagaagcaagtaattgactaccaataaagaattttttaggggatgttacagagcgaggtaatatagaagacataactaaattcctttatttagattttgctacagtaagtagcagaattaacatttatcttacccctcatcagaattcgaatctagtaaactctgtaatagatattatcaatatattctatttagtttaaagaaaacaacatgttaataaaataataaattttatagaatggcaagatagcttatcgtaaagaagataatttcccttaaaacttcaattaaacctagaaaactaaacaactatattatgatgttatcagtagcgttacccactaataccattaaaggaacaacacaattaaccattatttgatatacatgcatggtatattcgcgttataactctcttttatttttaccaaggtgatttttgtgaaagacgccgtgatcctcgttgataaaaatgacaatgagctaggaaccatgcccaagctggaggcacatattgctggtgccttacatagagccttttcattatttattttcaattctaagcaacaaatgttgatccagcaacgagcactgactaaatatcactctggtggtctatgggcgaatacttgttgtagccatcctttacccaatgaacctctatcacaagcaatacatcggcgtttaaatgaagaattaggtatgcagtgtgatatgcaacctattggtacgattttatataatgagaaagtcacggatgatcttattgagcatgagtttgatcatctttttttaggctttagtgataaaacaccacagtgtcatcccgatgaagttatggatcatcgttggatttcattaaacgagctttatcatgatgtagaaaaacatcctgaaaactatagtgcatggttctgccatatattaatggctcttggtatagagcagtttactcgatggagtaaaaatattacttagttgctctcttattgaaattgatacttaactataaaaaagtgttagcatgactcaaggtaaaatacgatcttctaaacgcaaaaaagccaacccattgggttggctttctcgtcttatttaatgcttggcagttccctactctcacatggggagaccccacactaccatcggcgctacggcgtttcacttctgagttcggcatgggatcaggtgggaccaccgcgctatggccgccaagcaaattctgttttaatcactcgcttctttcctttcggtaagtcgccagtaattcaatcttaaacaagctgactttatcgtttcgtctctctgacaaaacactttcggtgttgtcaggttaagcctcacggttcattagtactggttagctcaacgtatcgctacgcttacacacccagcctatcaacgtcttagtcttaaacgttcctttaggtcacttaaagtgacagggaagactcatctcgaggcaagtttcccgcttagatgctttcagcggttatctcttccgcacttagctaccgggcaatgccattggcatgacaacccgaacaccagtggtgcgttcactccggtcctctcgtactaggagcaacccctctcaatcttccaacgcccacggcagatagggaccgaactgtctcacgacgttctaaacccagctcgcgtaccactttaaatggcgaacagccatacccttgggacctacttcagccccaggatgtgatgagccgacatcgaggtgccaaacaccgccgtcgatatgaactcttgggcggtatcagcctgttatccccggagtaccttttatccgttgagcgatggcccttccattcagaaccaccggatcactaagacctactttcgtacctgctcgagccgtcactctcgcagtcaagctggcttatgcctttgcactaaccgcatgatgtccgaccatgcttagccaaccttcgtgctcctccgttactctttaggaggagaccgccccagtcaaactacccaccagacacggtccccgacccagtttatgggcctaggttagaacatcaaacgttaaagggtggtatttcaaggttggctccatgcagactggcgtccacacttcaaagcctcccacctatcctacacatcaaggctcaatgttcagtgtcaagctatagtaaaggttcacggggtctttccgtcttgccgcgggtacactgcatcttcacagcgagttcaatttcactgagtctcgggtggagacagcctggccatcattacgccattcgtgcaggtcggaacttacccgacaaggaatttcgctaccttaggaccgttatagttacggccgccgtttactggggcttcgatcaggagcttcgccttgcggctgaccccatcaattaaccttccagcaccgggcaggcgtcacaccgtatacgtccactttcgtgtttgcacagtgctgtgtttttaataaacagttgcagccagctggtatcttcgactggcttcagcgccgtccgcgagggactttacctaccgccagcgtgccttctcccgaagttacggcaccattttgcctagttccttcacccgagttctctcaagcgcctgagtattctctacctgaccacctgtgtcggtttggggtacgattgttggtaacctgaagcttagaggcttttcctggaagcggggcatcaattgcttcaccaccttagtggttcgtcatcacatctcagcattaagtgaccggatttgcctaatcactctgcctacctgcttgaaccgggacgaccgtcgcccggacaacctagccttctccgttcccccatcgcagttaccaccagtacgggaatattaacccgtttcccatcgactacgcttttcagcctcgccttaggggtcgactcaccctgccccgattaacgttggacaggaacccttggtcttccggcgtgcgggtttttcacccgcattatcgttacttatgtcagcattcgcacttctgatacctccagcatacctcacagtacaccttcgcaggcttacagaacgctcccctacccaacaacactatgtgtcgctgccgcagcttcggtgcatggtttagccccgttacatcttccgcgcgggccgactcgaccagtgagctattacgctttctttaaatgatggctgcttctaagccaacatcctggctgtctgagccttcccacttcgtttcccacttaaccatgactttgggaccttagctggcggtctgggttgtttccctcttcacgacggacgttagcacccgccgtgtgtctcccgtgataacattcttcggtattcgcagtttgcatcgagttggtaagtcgggatgaccccctagtcgaaacagtgctctacccccgaagatgagttcacgaggcgctacctaaatagctttcggggagaaccagctatctcccggtttgattggcctttcacccccatccacaagtcatccgctaatttttcaacattagtcggttcggtcctccagttagtgttacccaaccttcaacctgcccatggatagatcaccgggtttcgggtctataccctgcaactcattcgcccagttaagactcggtttccctacggctcccctatgcggttaaccttgctacagaatataagtcgctgacccattatacaaaaggtacgcagtcaccccataaagaggctcctactgcttgtacgtacacggtttcaggttctttttcactcccctcgccggggttcttttcgcctttccctcacggtactggttcactatcggtcaatcaggagtatttagccttggaggatggtccccccatattcagacaggataacacgtgtcccgccctactcgtcgagttcacaataacagcatcttcagatacggggctatcaccctttactgccggactttccagaccgttctcctgacactgctattgattaagactctgggctgctccccgttcgctcgccgctactaggggaatctcggttgatttcttttcctcggggtactgagatgtttcagttctcccggttcgcctcattaacctatggattcagttaatgatagtatccattggatactgggtttccccattcggatatcgtcgggtataacggttcatatcaccttaccgacgcttttcgcagattagcacgtccttcatcgcctctgattgcctaggcatccaccgtgtacgcttattcgcttaacctcacaacccgaaagtgtctctttcaaagactatctgggtggtgatggctgcgcagattacatttcttcgttgggcagtgctcgcaatgctcacatacttaagtatgctgcgcttgctgtgcgctgtccgcctcgaactgtaaattgctcgctcatcccactttgatgtcaaaacacattcaaagtttgagattttgagagactcatcaatatacctcggtgatatattgatttgttttcaatttttcagcttgttccagattgttaaagagcataataattcgcagtatactattcctaatatactctgaatcattgttttatatccaagagattatggtggagctaagcgggatcgaaccgctgacctcctgcgtgcaaggcaggcgctctcccagctgagctatagccccataatgttttaatacccgtataaccactcctttttcttcttataataagaagctttttctttaggcaaggcgtggagtaacgaagtttacttaatgtaaacgagttgcttcacaacacagcataaaggaaaagtggtaggcctgagtggacttgaaccaccgacctcacccttatcaggggtgcgctctaaccacctgagctacaagcctataccggtatctctgctcgttcttcatcagacaatctgtgtgagcacttcacataacacgtatctcttaggtaaggaggtgatccaaccgcaggttcccctacggttaccttgttacgacttcaccccagtcatgaatcacaaagtggtaagcgccctcccgaaggttaagctacctacttcttttgcaacccactcccatggtgtgacgggcggtgtgtacaaggcccgggaacgtattcaccgtagcattctgatctacgattactagcgattccgacttcatggagtcgagttgcagactccaatccggactacgacagactttatgagttccgcttgctctcgcgaggtcgcttctctttgtatctgccattgtagcacgtgtgtagccctactcgtaagggccatgatgacttgacgtcatccccaccttcctccggtttatcaccggcagtctcctttgagttcccaccattacgtgctggcaacaaaggataagggttgcgctcgttgcgggacttaacccaacatttcacaacacgagctgacgacagccatgcagcacctgtctcagcgttcccgaaggcactcctctatctctaaaggattcgctggatgtcaagagtaggtaaggttcttcgcgttgcatcgaattaaaccacatgctccaccgcttgtgcgggcccccgtcaattcatttgagttttaaccttgcggccgtactccccaggcggtcgatttaacgcgttagctccagaagccacggttcaagaccacaacctctaaatcgacatcgtttacagcgtggactaccagggtatctaatcctgtttgctccccacgctttcgcacctgagcgtcagtctttgtccagggggccgccttcgccaccggtattcctccacatctctacgcatttcaccgctacacatggaattctacccccctctacaagactctagccaaccagtttcagatgcaattcccaagttaagctcggggctttcacatctgacttaattgaccgcctgcgtgcgctttacgcccagtaattccgattaacgcttgcaccctccgtattaccgcggctgctggcacggagttagccggtgcttcttctgcgggtaacgtcaattgacaagggtattaaccttatcaccttcctccccgctgaaagtactttacaaccctaaggccttcttcatacacgcggcatggctgcatcaggcttgcgcccattgtgcaatattccccactgctgcctcccgtaggagtctgggccgtgtctcagtcccagtgtggctgatcatcctctcagaccagctagagatcgtcgcctaggtgagcctttaccccacctactagctaatcccatatgggttcatccgatagtgcaaggtccgaagagcccctgctttggtccgtagacattatgcggtattagccaccgtttccagtagttatccccctctatcgggcagatccccatacattactcacccgtccgccgctcgtcagcaagaaagcaagctttctcctgttaccgctcgacttgcatgtgttaggcctgccgccagcgttcaatctgagccatgatcaaactcttcaattaaaagtgtttgatgctcaaagaaatcgaaaacttagcttattcattatatgaattaacttgttagtcactcttcaagacttgatacatctaattttttagaagatatcgtctctgcgagtgcccacacagattgtctgataatttgttaaagagcagtgcaactgtcgctgccgtttccggtcttctgcgttgttgcgaggaggtgcattctacatcttcctcattcagtgtcaagcgctaatttattaggcttttcactttttattttgttctctcagccagttcgcttagcgccctgtgccgtgacaacgaggacgcattatagggagttttctgaggctggcaatagtttttttaagaaaaaaattcgtttgcttaattccacagcaaaacccttagttatacgcagttatcaacaattttatccacaagccatcttttcccacaaatttagcatgtcaaacgcaaacgtttgcgttattataatacccaaatgagtgagattgattttgtcttcatcttctgaaatgttagtggtgcaaacacaatttcactgtatcaacgtgacttttcatcacaatgactactgttatacaaaaacccaagggataaaactcatgcaacaccttcgtcctatccgccgtgctcttttaagtgtgtctgataaagcaggtattttagaatttgcgaaagcgcttgtagaaagaaatgtagaacttttatcaacaggagggacagcgcgtctattagcagaagctggcttacccgttatagaagtctctgactacaccggttttccagaaatgatggatggtcgtgtaaaaacacttcaccctaaagtacatggtggtattttaggacgtcgtggacaagatgataccattatggaggaacatgatattcgtcctatcgacatggttgttgtcaatctttatcccttcgctaaaacagtagcccatcccgattgctcattagcagatgctgttgagaatattgatattggtggtcctaccatggttcgttccgcagcaaagaaccataaagacgtcaccattgtggttaatagcaatgactatgaaaaagtgattgaagaaatggacaatcaccaaaacagtctgactttagatacacgttttgatttagccattaaagcctttgagcataccgcagcttatgacagtatgattgcgaactactttggccaaaaagttgcaccttattatggtgatacttcacaaccatcaggaaccttccctcgtaccttaaatcttaactatataaagaaacaagatatgcgttatggtgagaatgctcatcagcaagcggctttctatatagaagagaatattgaagaagcctctatcgcaacagcaaatcaattacaaggtaaggcactctcttataacaatattgccgatactgatgctgcattggaatgcgtgaaatcattttccgaaccagcttgtgttatcgtgaaacatgcaaacccttgtggcgttgctattgcggacactctcacacaagcatatgacaatgcatttaaaactgatccaacttctgcatttggcggtattatcgctttcaatagaagcttagatgcaaaaacagcaagtgccgttatagagcgtcaatttgtcgaagtcattatcgcgccttctattaatgaagatgctctacctattttagcaaccaaacctaatgttcgtgtattagcctgtggtgaatggcaagaagctaaacctgcacttgatttcaaacgggttaacggaggcttattagtacaagatcgtgatttaggtatggttaaagaagaaaacctaagggttgtcacgcaacgccagcctagtgaacgagaatggaaagatgcgctattttgctggaaagttgcaaaatttgtgaaatccaacgcaattgtgtatgccaaaaatgacatgacgattggcattggtgcgggccaaatgagccgagtctattctgctaaaatagcagggattaaagcggctgatgaaggtttagaagtggcaggttgcgccatggcatctgatgcattctttccctttagagatggtattgatgcggcagctatggccggtgtaacttgtgttattcagccaggtggttctattcgtgatgatgaagtaattgcagcagctaatgaacacaatatcgcgatgatttttactaacatgcgtcattttcgccattaataagggattgctatgaaaattttaattattggtaatggtggtcgtgaacatgcactagcttggaaagcagcgcaatcgcctttagcaacccaagtgtttgttgcccccggtaatgcaggaacagcattagaacatggcgtacaaaacgttgatattagtgccactgatattgccgcattagttgcatttgcccagcaaaatcacattgatttaaccattgtggggcctgaggcaccattggtaattggtgtagtagatgcgttcaaacaagcgggactgatgatttttggccccaccaaaggtgcggcacaactagaaggttcgaaagcatttacaaaagattttttagcccgccatcatatcccaacggcagcttatcaaaactttactgaaatagcgcctgcacttgaatatctccataaagttggcacacctattgtgattaaagcggatggcctagctgcgggtaaaggtgtcattgttgccatgacacataccgaagcagaaaatgcgataaaagatatgttagcaggtaatgcctttggtgatgcaggacaccgtattgttattgaagaatttcttgatggagaagaagccagttttattgtcatggtggatggtgaaaatgtacttccgatggcaacaagtcaagatcataagcgcgtcggtgatggtgactcaggcccaaacaccggcggaatgggggcttattctcctgcaccggttgttactcctgaaatccaccagcaagtcatggataacatcatttatccaactgtcaaaggcatggctgccgaaggacatcgctatcaaggttttctttatgcaggcttaatgattgataagcaaggtattgccaaagtcattgagtttaactgccgttttggcgatccggaaacgcaacctattatgatgcgcatgcaatcagacttagttgatctctgtttagcgggtgcaaaaggcgaactagcaggtaaagactccatttgggatccccgccccgctttaggtgttgtaatggccgccggtggctatcctgataactaccgccaaaatgatattattgagggactaacagcaacatcttcttcaacagctaaggtatttcaagcaggaacaaaattaacggctcaaggtgaagttgttacagcaggaggccgagtattatgtgcaactgctttaggggaaaatatcgaacaagctcaaaagaatgcctatgctttagccaacagtattcactggtatggctgtttctatcgccatgatatcggctatcgtgccattgcgcgtttaaaaaagtaagttaaaacagcaaaagggagtgatcacaaactctcttttgttggttcccatttacaaaaatcgtgttctgcaaccattaacaactggttaccttcgggggaatccaaccaagcaacataagcgggacgagttagatgctgtgttctacgttttagccaacgttgttctggtgcttcaaatgatacattcactttttcacccgcacatgttgtcaatgtatcttgataccaggttccttgaactagctttacctgacctattgccaatgccttactgatctctcgttctcgactggctgcaaataccatttttaaacgttcatcttctgttaatgggcgcttttgtccttgatactcttgttgcataaagataacttcgccacgtttatttaaacgtaaatgccaagaggaaggatgggagggattaacgatttcactgcgaatttgccataatctattttggcggtactcataaaaagtgacaacagtttcaggcttttgataaaagctatagacactcataatcacttgaggctctgatgttttgttatttaaacgccaaagccgcacaaccccttcatctgcaatatagcccgttgcagaaaattcgggtagttgtggagaagaagagcaggcgctgagcaaaaaagagaaccctattgctaacagcccctgtcgtctcaacaaaaggggagcaactccccctctattgttcattccgttcaaaggaattattttactgcgtctttcagtgctttaccggcagtaaatgcaggaacgttagctgctgcaattttaatttctttgccagtttgagggttacgaccagtacgctctgcacggtgattcactttgaatgtaccgaaaccaactaactggacagaatcaccttctttcagagcacctgttactgagtcgataaacgcttcaatagcagcttttgcctgagtttttgtcagatccgctttttcagcaactgattcggttaattcagctttgttcataaaatagtccttaaagtatgttttatcgtttgaaaaacatctggtgaaaaaacttaattcatcttttttagagagtcagttaagcaaaacacctgagccacttcttttcgtacccaatgtagaacatacacgggggtaatgtgaagtctttaaacgtcgcttttcaagcactaaatcacgtttttctgatttagtgcgttaattctataccgatattgctcattccagattcgcgcaggtctgtacgcagaccttttattagttcaatatctctttcttcgcactcaacaagtaggcgataaatttcccattgaatatcgaactcttcagtgaccgcagcaagagattttaattcttcttcagacatttctctttctgcttgtgtcatttcaagtgtagcaacagttccaaccgaaattttgctcacttcaatagcatgactgagtgactcaccacttaaacgagaatgaataagctcactcagtgccacacaggcgtcgattgcaggatagacaccataaatatcaaactgagatgcatcaggaatagcttcttctaatttctctaattgagaatcaaaattcaccttcgcatcttttaccgttaaagtttcccaaactagatcgagaatacgacgatacagggttggatcagtaaatcctgtttcgcgacaaaatacctgataatttggatacattctctcacacaggcacgccataaacgttaagtgttgccaactttcaagcttttctaaacgtaaatggattgggttcttcaacattagtgattactcattttcttaacttagccgcagtttacctgaaaattgaaaatatccacatatttaccgccgatttagagcttattcttattcaattgctcaaataatcgcctatttgaggcaataccatcggcccaacgagtcggttcaggtaatcgatatccatttatacagcgttttacccacgctaatgcactctccatactcactttatagcctggagaaatatataaaggtttacatctttttttactacgataaatccaacctaactgctcatccttatccattaatttttccgtacttcctacatcgtcgtctaattttttatcatcaccacataaacgactttttgccacaccgatggttggaatatcggctaagagtccaaaatgacttgccacccctaaccgtctaggatgtgcgatcccttgaccatcaacaaaaacaagttgcggtttttgcttgatgccctgccaagcttttaataacgcaggacactcacggaatgaaaggagtccgggaatataaggtagtaatgttgcaatacgggctatttgatattcaacaatttcaaaggagggataatgcataacaacaatagcggcacgagtgaccgcaccgctattttcaaatccgacatcggcacctgcaatataagttggtgccataaattggtcggttaagataatctgttgagctttctctgtctgctcttgacgtaattgctgagtattaatcattatcctgatgataaggcttcgatagacggtgaaccgcatcaataaatgctccagcatgcgctggtggaacatcttgatgaataccgtgcccaagattaaagacatgaccagtacctttgccaaagccagctaaaatcgtagcgacttcttgttctattcttgctggtggcgcatacaacatagaaggatccatattaccttgtaaggcaaccttatcaccgactcgacggcgagcatcttcgatatcaatcgtccaatcaagtcctaatgcatcacaacctgtggctgccatcgcttctaaccaacgcccaccacctttagtaaataaggtgaccggaacttttctgccctcattctcacgaataagaccatcaacaatcttatgcatgtattgtaatgagaacaattgataatcgcgtcctgttagcacacctccccatgtatcgaagatcatgatggattgtgcccctgctttaatctgagcattcaaataaaggataacgctatccgccagtttatccagtaatagatgcagagcttgtggctcgctatacatcatttttttaatttttgtgaacgccttactacttccaccttcaatcatataagtagctagtgtccatggactacctgaaaaaccaattaatggcacattaccttgcaatgcatgacgaattgcacgtaccgcattcatgacataacctaattcatcttccggatcgggaataggtaatttttttatatcatcaaggctatttatcggtgttttaaaacgaggaccttcccctgtttcaaaatacagacctaatcccatcgcatcagggatagttaaaatatcagaaaataggatagcggcatctaaaggaaaacgtcttaaaggctgtaaggtaacttcgcatgccaattcggtatttttgcacaatgagatgaagtctcccgcctgtgctcgtgtttccttgtattcaggaaggtatctgcctgcctgacgcatcatccaaacaggggtgacatcaacaggttggcgcaacagcgcacgtaaatagcggtcgtttttcaactcactcatgtctaactccattaatagtaatagggccgcaaaatagcgtgtagtgtaacatgttggaaaaataacagttggcaggcaacacctttatttagctattttcttcatcttgtctaatattcgctatcgtatcttctattaaacgtcgcgcaatagtatcagaaggtggtatttgtggtaactcatcatagcgataccatgctgcactgattaattccgaaggatcatgtcgtaactctccccctgcataatcggcaagaaaacccatcataagagaatgagggaaaggccatggttgtgaagaaacataacgaatattgcgaatatgaatatgactttcttcaaaaacttcgcgagctaccgcatcttctaagctttcccctacttcaacaaaaccagctaaaacggtgtagagtggtgaatgtttatgcctaacatggtgtgctaatagaattttatctttattacgaataccaacaataatacaaggtgctatttgtgggtaataacgctcatgacagttatcacataaacatgcccattcactctcactatggcgcattttagccccacaatagccacaaaaccgatgagaacgataaaattcagcaagttgaacaccacgaccgactaatttaaataacttttcatcttgagatgcgataagccttggtgaacacatatcgctttccattttgtcataaatcagccagacattttctccttgccattccccaacaattttggcttgtttacccacaagtccccaatctgttgctaaaccaaatggaagttcacctttgggtaaccaaactcggccgcctaggctgactgtccaccagcctttttcaccacctgttagcgtatataaatgcatagtaataattctatcttagttaatgatatacaatagaggatactctctttcacaagagccgctcaatgaattatgtcgctacgccaaaattcatctatacctccatggtaaaaatataaattgtatttataaataaggttcactcgaatgacaaacataacgaaacataagatcgctatttttgatttagatgaaacactgttagccggagattctagctgtttatggacaaattacttgtgggagaaaaagagagtcactgatcctgcttttttagctttagataaacaaatgatcgctgactattacgcagaaaggctcaatataaataagtacttacaccaacatttatcttattttaatcagcataatattgaagaaataaatcaatgggttactgattttactcataccataatcaagccattgctctatcctcaaggcattaatactataaacctataccgacaacaaaatatccccgttatcattatctctgcaactatgtcttttctggtacatgcgattgcaaaacaacttaatgctgatatttctatgggcattgatatgcagataaaaaataatcattatacaggccatattgagggtattcctacctttagagagggtaaagtcactcgactcaatcagtggaaagaacaaaacaacattaaggattcttatatttatttctatactgactcagccaacgatctccctttatgctatcaagcaaatgaggttatcaccattaacgccgatgaaagattaagccaaatagcaacagaaaaagaatggcaacagtgctactggcagttaaataaataatcattatcgggcttgtagtttttaagatctttaatatactgtgggcattcttgtcggagtgcctagtgtttataaggctatttttaacacaggctgagaccgttaattcgggatccgcggaacctgatcgggctaatacccgcgaagggaacaagagtcattcgacctttagatagcttcattgtgtctattttttacactcttatctgtcgatactccctgcgacctccagacaagcatttttctcaatattcacccgacaagccttgtgcttgattgatatttattaggaaatgctatgtccaaaaatcaaactatctctattaaagatgtttcgcccactgcgaataaacagcgcccacgtaaagaacaacgcgatgcagcgcaatcctttattagcactattcaaggtattaattttcccaattcaaaacgtatttatatcactggtactcgttcagatattcaagtgccaatgcgtgagatccaacttgataagaccctgatcggtggctcaaaagaagatcctatttttgaagagaatgaacctattccagtctatgacacttcagggccttatggtgatccaacttctcaacttgacgttaatcttggcttaaaaaaaattcgccaaccatggattgatgcgcgtaatgataccgaacctctttcacacttaagttctgatttcactcaacaacgccttactgatgcaggattagaacatctacgctttccgttaaaacccagccctagaaaagcgctaaataataagagagtgacgcaattacattacgctcgcaaaggtattattacgccagaaatggaatttattgccattcgagaaaatatggggcgagaacgtattcgtagcgaagtattacgccaacaacatgccggatttagctttggtgcacatttacctgacaatattacgcctgagtttgtacgccaagaagttgctgctggtcgtgccattattcctgccaatatcaatcacccagaatctgagccgatgattattggccgtaatttcttagttaaggtgaatgctaatatcggcaactcttcggttacctcatctatcgaagaagaagtagaaaaactgatttggtcaacacgttggggggccgataccgtgatggatctgtcaactggacgttatatccacgaaacacgtgaatggatcatccgtaatagcccagtccctattggtactgttcctatttatcaagctctcgaaaaagttaacggtattgcagaagatctcacttgggaaatgttccgtgatactttattagaacaagcggaacaaggggtggattatttcactatccatgcaggtgtcctattacgctatgttcctatgaccgcaaaacgtttaacgggtattgtctctcgtggtggttcaattatggcgaagtggtgtttatcacaccataaagaaaatttcctctatacccacttccgagagatttgcgaaatctgcaccgcttatgatgtttcattatcattaggtgatggtctaagacctggctctatccaagatgctaacgatgaagcacagttcgctgaattacataccttgggtgaattaacaaagattgcttgggaatatgatgtacaagtcatgattgaaggcccaggtcatgtaccaatgcagatgatacgtcgcaatatgacggaagaactagagcattgtcatgaagcccccttctatacattaggccctctaacaactgatatagcaccgggctacgatcattttacttccggtattggcgctgcaatgattggctggtttggctgtgccatgctctgttatgtcactccgaaagagcatctcggactccccaataaagaagatgtgaaacaaggtcttattacttataaaatcgccgcccatgctgctgatcttgccaaaggacatcccggcgcgcaaattcgtgataacgccatgtctaaagcccgttttgagtttcgatgggaagatcaatttaatctagcacttgatcctgaaactgcccgtcaatatcacgatgaaaccttacctcaagcatcggggaaagtcgctcacttctgctctatgtgtggacctaaattctgctcaatgaagataacacaagaagtgcgtgattatgcagcaggtatggagcagatgtcgcaagcctttaaagcccatggtagtgagctataccacagtgcagaaatagccagttccgaggtagctgataatgaacagatcctctaattcggcttttgccccaaccgaaaaaaagttggggctttaccctgttgtcgattctattgaatgggttgagcgcctgttgaaaataggtgtaacaacgatccaattacgcatcaaagataaacagcccaaagatgttgaacaagatataatcactgcaatcaaattaggtcgtaagtataacgcaagattatttatcaatgattattggcaactcgccattaaacatcacgcttatggtgttcatcttggacaagaagatctcgacattgccgatcttgatgctattaaacagtcaggtttatgccttggtatttccacccataatgacactgaactacaaagagcaaaaaggttacttccctcttatattgctttagggcatatatttccaacgacgacgaaagatatgccatcaaagccacaaggtttaagagcactcaaacatcaagtagaacaaactcatgattttccaaccgttgctattggcgggatctctctagaaaaagtctctgatgtcgtagcaactggcgttggtggagttgctttagtgagtgcaataacaaaggcatcagactggcaacaggtaacacttaaattattagaattagtagagggaaaaccatcatgctaaatgataatgattttatgcgttatagccgacaagtgatgttagaagatataggattaaaagggcaaaccaaaatacagcaagccagagtattaattattggcttaggtgggttaggctctccagcatcactttatctagcaggtgcaggagtgggtgaacttattttagtcgatgatgataatttgcatgtctcgaatttacagcgtcaaattctctatcgcactcaagatatcccagatgcaaaatcagacatcgccaaacaggctctacttgccttaaatcctgacattaaaatcaccacctataaacaacgtgttaatgatgattttccctctacgttgcttcaaaacatcgatttagttttagattgcactgataacatgagcactcgccaagcaatcaatcgtatctgtgttaaacaacaaataccgcttattagtggcagtgccgttggatttagtggtcagttgatcgtgtttgagcccccttttattcatggttgttaccactgtctctatcctgataacaaagagccacaacgcaattgccaaacagctggaattctaggccccgttgtaggggtcattggtactctgcaggcacttgaagcaattaagttacttgcaggtttaccaagtacgttaagtggaaaactacgtctgttcgatggtagaaaacaaaattggagcaccttgcgcttaacaccatcaaaaaactgtcctgtttgtcgagggttagcatgaatattaccgtaaatgacgaacgttattctctggatatgcctgtcacgataagccagctccttattgagttaaaacaaccctctatgggggtggcactcgctatcaacgacatcattattccgcgtgaaaactggaatacacaaatgatcaatgagggtgacacaattcttctctttcaagcaattgcgggaggctgatatgttgaaaattgctgatactacattcacatcaaggttatttactggtacaggtaaatttgcgacaccaacactcatggctgaagccattaaagcctctggtagccaattagtcacaatggcaatgaagcgtgttgatttaaaaaatggcaatgatgatctaatcgcccctcttaaatcattagggataaaattattacctaatacttctggtgcaaaaacagcacaagaagccgtttttgctgcacgattagcaaaagaggcctttgatacccattggatcaaattagaaattcatcctgataccaaatacctacttcctgatccaatagaaacacttaaggcggctgaacttcttgttaaagaaggttttgtggttttaccttattgcagtgctgatccggtattatgccgtcgcttagaagaggtaggatgcgcagctgtaatgccgttaggttcacctattggttccaatcagggtttacaaactcgcgattttttgcggattattattgagcaaacctcaatacccgttgttgttgacgcaggtattggcgcaccaagccatgctcttgaagctttagaattgggtgcggatgctgtactcgttaataccgccatagccgtagctaaaaatccagttttaatggctcaagcttttaaagctgcaattgatgctggagagcttgctcgacaatctggactggctgtaccgacttcaataacacatatgcaagcacaagcctctagcccattaacccaatatttagaggctttctaatgaaaacattttctgattattggcaacaattagattgggatgacatcacgttaagactgaatagtaaaacttgtgaagatgttgaaactgctttatctcatcatactttaacgcttgatgattttatggcgctgatctcccctgctggccgacattatttagagccaatggcacaacgtgcccagcaactaactcgacaacgttttggtaatgttgtcggtttatatgttccactgtacctctctaatttatgtgctaatgattgcacttattgtggcttttcaatgagtaatgccatcaagcgcaaaacattaaatgaaaacgaaatccttgctgaatgtcatagcattcggcaattaggttttgatagcctgctactcgttacaggagagcatcaaagaaaagttggtatggattatttccgtcaatatataccgcttattcgccagcagttcagtttattaatgatggaagtacaacctctggcgacaaatgagtacgctgaattaaaaacgctcggtattgatggtgtaatggtttatcaagaaacctatcatgaacccacttatcagttgcatcatctaagaggaaaaaaacaagattttcattggcggttacaaacccctgatagattagggcaagccggcattgataaaattggtttaggtgcactaattggtttatctgacagatggcgtaccgattgttatatggtggctgagcatctgctatttttacaaaaacgttactggaaaagtcgttactctatctcctttcctcgtctacgcccatgtgctggtgggcttaatcctgcatcggtaatgagtgaagcagaattagttcagttgatttgtgcttttcgtattttagcccccgatgttgagctttccctttcaacacgtgaatcgccttactttcgcgataatacagtacctttagccatcaataatatcagcgctggctctaaaactcagcccggtggttattctgatagtcatgaggagttagagcaattttcacctaatgataatcgtcatgtcagtgatgtaattaatgctctcaaaacacgaggattacagcctgtatggaaagattgggataactatttaggtcgttaatagagataaaataataccgcgttttaatttatttttttaataaatataatcgcggttttattacataacacatagtaataaataattaaaaataatatcaatacgttagatataacaataaatttttcttaaaaagattaagttaactaactatttcattaggttaaaatcaatattttaagttcttgtatacttaaaccagttattcgttcaataaattctaactcaacgttttcttttaataagttttttgctaattgtatttgtactatctttttacctatttctataccttcatttttacctatttctataccttcatttttacctatctctatcccctccatttttcctaatttaaatcctttattttctaaccgccatgcaatattcataatcgtctctctatggttatctacttgttcagctatcttatttatgatggattcaaaatccgccgcatccataattgagaataaatattgtacaacagcgatagtgtcttcatcactgcagtttttctgatttatcgcttttgagagaagcatcgctaacttatcaagatcatcgcaactgttcacatgtttcattgcaatttccattacagcggcttttctatgtgttaataaaatttcatcatcaattgaattcaaatcaattaatgcaaaattattaagatagagttgatttgccaatgtagaaagcggaaaacaatctaaccaattgacagaaaaaggataaggtttgcgtttgccatgataaaacaagataggaacaaccaacggcaaagatgtgtaaccttgctgtagatgctgattcatagtgcaaaacgcatagtgcatcatacgccaagcgatcattttatctggtcgagattggtgctcaattaagaaataaattgagatattcccctttttggttttcactgagtagagaatatctgacatacgagaacgtaatttaatatcgataaaagaggaattttgtagctttaaagttgaaaaatcacaatagctttttaattcgtctgataaatggataaaaaagaaatccttagcattactaatattcatcatgaagcgtttgaatgcagcatcatgagaagaaattaaaagaggtttattcatcgctgactccgtgctaaatgtggaccgccagcttacagaaaaaaatgaccttttacttagtaaaaaatcatcataaatatctgaaaaatataaacttaattatttaacttacctatgcaagtataaaaaagagcaaaaaaataccctcgataactatcgagggtatttatatttaaaactaatgcagtatcaattagttatttgatgaaccgccgaaacccgcattcagcaattctgctaagttagcagaagcttcatctgcactgattgttgcttcagtttcatccgttggcagttgttgttgacgacgttggatacgatcctgatggtacgcaaaaccagtacctgcagggatcagacgacccacaataacgttttcttttaaaccacgtaattcgtcacgtttacctgcaacagcagcttcagtcagtacgcgtgttgtttcttggaacgatgccgcagagatgaaagactcagtagccagtgatgctttcgtaatacctaataggtcacgagagtatgttgctggtactttaccttcttcctctaaaatacggttcgaaactttaacacgagcgtattcaacttgttcaccttcaaggaattcagaactaccggcattttcgatagtcactttacgtagcatctgacgaacgataacttcgatgtgtttatcgttaatcttaaccccttgtaaacggtaaacttcctgtacttcattagtgatatagcgagtaaccgcatgaacaccacgtaagcgcagaatgtcatgtggtgattctggaccatcggagataacatcaccgcgttccacaacctcaccttcaaatacgttaagttgacgccatttagggatcatctcttcgtatgcatcgctgccatctaatggagaaataactaagcgacgtttacctttcgtttctttaccgaaagaaacaataccgctgatttcagcaaggattgcaggctctttcggacgacgagcttcaaacaagtcagcaacgcgtggtagaccaccggtaatatctttagtaccaccagattcttgaggaatacgtgctaacgtatcacccgcattaatagcaacaccatcatctaattgaacgatagctttacctggcaggaagtactgtgccggcatatctgtattcgggattaatacatcattaccttgtgcatcggtgatgcgcaatgctggacgtaaatctttaccgctaccagtacgctctgcagtatccagaacaaccagtgaagaaagaccggttaattcatccgtttgacgagtaatggtttgaccatcaaccatatcagcaaaacggataataccagaaacctcactcaccacaggcatggtatgtggatcccagttagcaactgtttcgccaccgttgacagcttcgccatcacctttcgataattgagcaccgtaaggtactttatagctttctttcgtacgaccgaattcgtcaatcagacgtaattctgtattacgagaagtaatcactaacttaccagcagtgttggtgataaatttcgcattgatcaatttcagagtacctttattacgtacctgaatgcttgattctgctgccgcacgggatgccgcaccaccgatgtggaacgtacgcatcgttaactgtgtaccaggctcaccgattgactgtgctgcgataacaccgatagcttcacctttgttgatgatatgaccacgagcaaggtcacgaccataacatttagcacatacaccaaagtctgtgtcacaggttacaactgaacgaactttaacgctgtctactgagttttcttctaacagatcacacagtttttcgtttaacagcgtattacgtggaacaaggatatctgcagtacctggtttcaggatatcttctgccgttacccgtcctaatacacgctcacgcagtggctctttaacatctccaccttcaatgaccggagtcatcattacaccttcggttgtaccacagtcgctttctgttacgacaaggtcttgtgcaacgtcaactaaacgacgagtcaagtaaccggagtttgctgttttcagtgcggtatccgccaaacctttacgagcaccgtgggttgagatgaagtactggagtacgttcagaccttcacggaagttcgcagtgattggggtttcgataatggagccatctggcttagccatcagaccacgcatacccgctaactgacggatctgagctgcagaaccacgagcaccggagtcagccatcataaagatgctgttgaaggaaacttgttgttcttcttcaccatcacggttgatcacagtttctgtagacagattttccatcatcgctttagcgacgcgttcattcgcagcagcccaaatatcgatgactttgttgtaacgttcacccgctgttaccagaccggattggaactgttcctgaatttctgcaacttctgcttctgcctcggcaatgatctctgcttttttcgcagggataaccatgtcatcgatacctactgaagcaccagaacgtgctgcgtaagcaaaaccggtatacatgatttggtcagcaaaaataactgttggctttaagcccattacgcggtagcaggtattcagcattttagaaatagcttttttacctaatggttggttaaccagtgcgtaaggtaggccttttggtacaatcatccataaaatagcacgaccaactgtagtgtcttttaagctagtttcagtggtgatattaccttcgccatctttgatctcttcagtgatacgtactttaacacgcgcgtgtaaagaggctaaacctgcgcgataaacgcgttcagcttcttttggaccacttaacaccatgccttcacctttggcattgatgcaatcacgagtcatgtagtaaagacctaataccacgtcctgtgaaggaacgataattgggtcaccacttgctggagacagaatattgttagttgacatcatcaacgcgcgagcttctaactgcgcttctaatgtcaatggaacgtgaaccgccatttggtcaccatcgaagtcggcgttatatgccgcacaaacgagtgggtgtaactgaatagctttaccttcaatcaggattggttcaaacgcctgtatacctaaacggtgaagtgtcggtgcacggtttagcataactgggtgttcacggataacttcatctaagatatcccaaactaccgcttcttcacgctcaaccatttttttagcggctttaattgttgtcgctaaaccacgggtttccagttttccgtaaataaatggtttgaataattcaagtgccatttttttcggcagaccacactgatgcagacgcaggtatggaccaacggtgattacagaacgaccagaatagtcaacacgtttacctaacaggttttgacggaaacgaccttgtttacctttgatcatatcagccaaagatttcagaggacgtttgttagagcctgtaattgcacgaccgcgacgaccgttatctaataacgcatcaacagactcttgtaacatacgtttttcgttacgtacgataatgtctggagctgctaaatctagcaggcgttttaaacggttattacggttgataacgcgacgatataaatcgttcaagtcagaagtcgcaaaacgaccaccatcaagtggaaccagtggacgtaagtctggtggtaacactggcagtacagttaagatcatccactcaggtttattgcctgattgcatgaatgcttcaagtaacttgatacgtttagtcagtttcttacgtttagtttcagagttagtctcatttaactcttcacgcagcgtttcacactcttgttccagatccatgctctgtaacaagttctgaacagcttcagcacccatcttcgcatcaaattcatcaccgaattcttctaatgcatcgaggtattgctcttctgttaagatttggccacgttcaaggctggtcataccaccttcaacaacaacataagattcaaaatacagtacacgttcaatatcgcgcagtggcatatccaacagcagaccgatacgggacggcagtgatttcaagaaccagatgtgcgccactggagaagctaattcgatgtgacccatacgttcacgacgaactttagtttgtgtgacttcaacgccacacttctcacagataacaccacggtgttttaaacgtttgtatttaccacacaaacattcgtaatcttttactggtccgaaaatacgggcacagaaaaggccgtcacgttctggtttgaacgtacggtagttaattgtttctggctttttaacttcaccaaatgaccatgaacggatcatatcaggtgatgccagagcaattttgatcgcatcaaactcttcggtcttggtttgcgctttcagaaactttaataagtctttcacgaaatggctcctgtcggagttagacctgccaggcaaatgacccctgtcattcacccctttaaaccagtgtagtcactgtttagcagactgccatatttagcagtctgctttcatggaatacgttattcgtcttccaattcgatgttgatacccagtgaacggatctctttcaacaatacgttgaacgactcaggcatacctggttccatctgatggttaccatcaacaatgtttttgtacattttggtacgaccgttaacgtcatccgacttaacagtaagcatttcttgtagcgtgtaagccgcaccgtatgcttccagtgcccatacttccatctccccgaaacgctgtccaccaaactgtgctttaccaccaagaggttgctgagtaactaagctgtacgaaccggtagaacgggcgtgcatcttgtcatcaactaagtggttcagtttcagcatgtacatgtaacctacagttactggacgttcgaattgttcacctgtacgaccatcgaaaagtgtaatctgaccagaagttggaagatctgctaatttcagcatctctttaatttccatctcttctgcaccatcgaacacaggtgttgcagttggcataccttttttcaggttttcagccaaacgtaacacttcttcatcactgaaggtgtccaaatcaactttctgacgaggtgccatacccagatcataagctttctggataaattcacgtaacttagccacttcttgttgctgtttcagcatcgcattgattttatcaccgatacctttagcagccatacccaagtgagtttcaaggatctgaccaatgttcatacgtgatggtacacccagtgggttcagtacgaggtcaacaggattaccgttttcatcgtatggcatgtcttcaattgggttaatcttagagataacacccttgttaccatgacgacccgccatcttatcaccaggttggatctgacgtttaacagccagataaaccttaacaatcttcaatacacccggtgctaaatcatcaccttgagtgatcttacgacgcttagcttccagtttcttcgcgaattcagctttcagttcatcatactgttcagctaattgttctaactggttttgcttctcttcatcagcaagacccagttctaaccaacgttcacgaggtagtttatctaatttgtcagcttcaataccgccggcaatcagaacgccacgaatacgtgcaaaaagacccgcttcaaagatacgtaactcttctgttaagtcttttttaacttcacgtaattgcgattcttcgatttctaatgcacgtttgtctttttctacgccatcacgggtgaagacttgtacatcaataactgtaccagatacaccgttaggaacacgcagagaagaatctttaacatcagatgctttttcaccgaagatagcacgtagcagtttctcttctggagtcagttgagtttcacctttcggtgttactttacctaccagaatatcaccgcctttcacttcagcaccgatataaacgatacctgattcatccagtttagataacgcagcttcaccaacattaggaatatctgcagtgatctcttcaggccctaacttagtatcacgagacacacaagcaagttcttgaatatggatagttgtgaaacggtcttcttgaacaacacgctcagatacaaggatggagtcctcgtagttataaccattccatggcataaatgccacgcgcatgttttgacctaatgcaagttcaccaaggtctgttgatggaccatcggcaagtacatcaccacgttcaacaggttcacctaaagaaacacaaggtgtttggttaatacatgtgttttggttagagcgggtatatttagttaagctgtaaatatcaatgcctgcttcaccagcataagtctcatcttcgtttactttgataacgatacgagaagcatcaacatactgaacagtaccaccacgttttgctaccgcagtaacaccggagtcaaccgctacagcacgttccatacctgtacctaccagtggtttatcaccacgaagtgtaggaacagcctgacgttgcatgttcgcacccatcaatgcacggttggcgtcatcgtgttcaaggaatgggatcagtgaagcaccgacagaaacaacctgttgagttgaaacgtccatgtactgaacttgatcacgactaaataaacttgactcacctttatgacggcaagttactaattcttctacgaagtggccatcatcatctaatacggagttagcctgagcaatgatgaagttaccttcttcaattgcagacagatagtggatttcatctgttacagcgttgttttctacaacacggtaaggcgtttctaagaatccgtactcgttagtctgtgcataaacagataatgagttaatcagaccgatatttggaccttcaggtgtttcgattgggcacacacgaccatagtgagttgggtgtacgtctcgaacttcgaagcctgcacgttcacgagtcagaccaccagggcctaatgcagaaatacgacgtttatgggtaatttctgacagcgggttattctgatccataaactgcgataactggctagagccaaagaactctttaactgcagcagaaatcggttttgcattgatcatatcttgtggcattaatgcatcaagatcacctaaagatagacgctctttaactgcacgctcaacacgcaccagaccaacacggaattggttttcagccatttcgccaacagaacgaatacgacggttacctaagtggtcgatatcatccacttcacctttaccattacggatatcaatcagttttttcatcacttcaatgatatcttcttggcttaagatgccagaaccttcaacttcttcgcgacctaaagagcggttgaacttcatgcgaccaaccgcagagagatcataacgatcttctgagaagaataagttctcaaataagttttctgccgcttcgcgagttggtggttcaccaggacgcatcatgcgatagatttcaactaatgcgcttaaacgatcgttggtaggatcgacgcgaatagtttctgaaatataagcaccatgatctaaatcgttggtaaacagtgtttcgatggttttatgaccagcttgacttaagcgagctaacacatctaaagagatttccatgttagcagcacaaatcaattcacctgtcgcttcatcaatatagtcacgagccactactttacctgcgatgtattcaacaggtacttcgatgcgctcaatttgttctttttctaactgacgaatatgacgagcagtaatacggcgacctttttcgacataaactttgccgtttgcttcaatatcaaatgaagctgtttcaccacgcagacgctcaggaactaacgtcatcatcagtttattattactgatttcaaacgttgttttctcgaagaacagatttaagatgtcttcggtgctgtagttcattgcgcgtaaaatgatagtcgctggtaatttacgacgacggtcaatacggacaaaaagattatctttagggtcgaattcgaagtctaaccatgaaccacgataaggaataatacgtgcgttatacagtactttacctgaagagtgcgttttacctttatcgctatcaaagaacacaccagggctacgatgtaactgggacacaataacacgctcagtaccattgataacaaaagtaccattatcggtcattaatgggatttcacccatatagacttcttgttctttgatgtctttaacggtgccttctggggcttcacgttcataaatgaccagacgcagttttacacgtaatggtgcagaataagttacaccacggatctgacattctttaacatcaaaaacaggctcgccaaggcggtagctgacatattgcagttcagcattgccgctgtagctttggattggaaatacggaacggaaagccgcttccagcccattttgaccatcaggatcttgctcgataaacttctggaacgagtcaagttggatagaaaggagatagggaacatccagaacttgtggacgtttaccaaaatccttacgaatacgttttttctcggtataggagtaaaccatagggttcctcagctcgctgaaaagtgacccactctgcctgcccttgttattaagggtgacacgacattcatctaacactgtttttttgtaggtaggaaaatagaattttccataatacttattgctattactcttaaatcatttcattgcattgcgcacactaccgagcttttggaaaaacgtggatcgtagtggctaacacagtatattaagtcgtcaatagcaaaaaatattgaggtaaagaggaagccaaaaaagtgtgaaaaagctactcttaccttacagcgcaaaaaggctggtgaccaaaaaatcaccagccatcagccgttaggctgctctctgggaagttaaattacttaacttcaacctcagcacctgcttcttccagagctttcttcagagcttcagcatcatctttgcttacgccttctttcagagctgctggagcagattctactaagtctttagcttctttcagaccaagaccggtagcgccacgtactgctttgattactgctactttgttaccgccgatacctttcaggataacgtcgaattcagttttttcttcagcagcttctgctggacccgcagcaacagcaacagctgcagcagcagatacaccgaatttttcttccatcatagtgatcagttcaacaacgtccattacagacatttcagcaactgcatttaagatatcgtctttagagatagacataacaattgttcctaaaattcagaaaaagtttatacgtagtaaagcaacgaaggaaattggctattaagcagcttctttctgatcgcgcagtgcagccagagtacgaaccagtttgccggcagcggcttctttcatggttgacatcaggcgtgcgattgcttcttcgtaagttggtagtgtagccaggcgatcaatgtttgaacctgggataaactcaccttcaaaggcagccgctttaatctcgaatgctgggttcgctttcgcgaaatctttgaacagacgagctgcagcgcccgggtgttcagaagagaaagcaatcaaggtaggaccaacaaatgcgtctttcagcacttcataagaagtaccttcaacagcgcgacgtagcaatgtgttacgtactacacgtacagtaacaccagcttcacgacatgctttacgcagttcagtcattttatctacagttacaccacgggaatccgcaacaactgcagacagcgcgcctttggcaacttcgctgacttcagcaacaatcgcttgtttgtcttgaagatttagtgccattagcttcttgctcctggattaaccgagtaaaaactcgggactcacatcacttattgccacaatggaaataagcgctaaaacacggtgagcagaatccagaatataaaattctttttggctctctcaccgtctacgcaggaaaattaagtaattacttacacctgcggtcttggacggggtctggataggccagactccaaccgaatttgggaatttagttatgttgactcacattcaaaatacaacatagctaaactcaaggcgtcaaattctatacaaatttgacgccaaggtaaagtcttttatgacttttagtctaatcgaggattaaactgtcgcgcttaagcttgcttgatcaatagcaacacctgcacccatagtggtagacaggcttactttcttgatataaacgcctttagctgaagatggttttgcttttttcagcgcaaccagcagagcttctaagttttctttcaactgagcttcgttgaaatcaactttaccgatagtggtatggataataccatttttgtcgttacggtaacgaacctgaccagctttagcatttttaacagcttcagcaacgttaggtgttacagtacccactttcgggtttggcattaaaccgcgtggaccaaggatttggcctaattgaccaacaacgcgcattgcatctggagatgcaattacaacgtcaaagtccatttcgccagctttaactttagcagctaagtcatccataccgactaattctgcaccagcttctttagcagcttctgcatttgcaccttgtgcgaatacagcaacgcgaactgaacgaccagtaccgtgtggcagaacagtagcaccacgaacgttttggtctgatttacgagcatcgatgccgaggttaacagcaacatcaacactttcaacaaatttagctgtagctaactctttcaataaagcaactgcttcattgatttcgtactgtttcactacatctactttttcacggatattgcgcatgcgcttggttagtttagccatcagattagtcctccactaccaggcccatggaacgagcagtaccttcaattgaacgcatcatagcttcaacatcagcaccagtcagatccgcagctttagtttctgcaatttcacgaacttgagcagtagttactttacctactttctctttgttcggtttgccagaacctgatttcacgcccgccgctttcttcagcagaatcgctgctggaggagttttagtcacgaaagtgaaagaacggtctgcgtaaactgtaataacaacagggattggtaaacctttttctacgctttcagttttagcgttgaatgctttacagaattccatgatgttaacaccttgttgacccagagctggaccaactggtggacttggattagccatacctgctgcaacttgcagtttgatataggcttggactttcttagccattaattaattcctcaatgtgggtatatcgcccggctagggctccccgatttactttgttttgtctcatgacaaaacaactcaaaacgaaaggtggaaaattgtagtgaacttttccaccttttgcaagaaaggcgagtaaaaaggtttaacctttttcaacctgactaaagtctaattccactggggtcgcacgaccaaagatagaaacagacactttcaggcgacttttctcgtaatcaacttcttcaacaacaccgttaaagtcagcaaatggaccatcactaacacgaaccatttcacctggttcaaacagtgttttaggacgtggtttgtcaccaacttgttgtagacgattcatgatcgcatcaacttctttatcactaattggtgcaggtctgtctgaagtaccgccaataaaacccatgactcttggcacattacgcacaagatgccaagttgcatcattcatgaccatttggacaagaacatagcctgggaaaaatttacgctcacttttacggcgctgtccgctacggatctcaacaacttcttctgttggaaccataacttcgccaaatgagtcttccatttcgtttaatttgatatgttcacgcagagactgtgctacacggccttcgaagcctgaaaaggcttgaataacataccagcgttttttaggagaatcagtcatgaacacctcacaggccagtaataaatgaaactaaacgaaccagaatgccatccagtccccaaagaaccaatgacacaatagccgtcaccgcagcaacgattaatgttgtctgcaatgtttcttgacgcgttggccatactaccttacgcatttcaattcgagcttcgcgagcaaatgctagtgttgctttaccttgtgttgtccacaacgcaactccgcccgcagccgcgaacagaataacaaccgctaaagcccgcaacgcaaggttaaattcacgataaagatagttgccacccactgctactaccagcaataagacggtaatgatccacttagcgatatcaccaccgcgtttgctatcttgagctccgctattcgcactcataaattaacctgtccatatgatgtaaataaatagccagcttgcctcgcaagagcaaaacaaatcagactaaccataaataaactatgattgcatctgacacagcgtcatatctctatgacattcgtatctgcaagatactggactcaattcgttgtatcagagcctatctcaccaataatttccagaaaactagtgatgagataggttctttttcaaacaacgcataaaaagggcatcaattgatgcccttctttaggaaaattaccgagtaattaacctaatactttagcaacaacacccgcacctactgtacggccaccttcacggattgcgaagcgtaaaccttcgtccattgcgattgggtggatcagttcaacgatcatgttcacgttgtcgcctggcattaccatttctacgccttctggtaattcgatagtaccagttacgtcagttgtacggaagtagaactgtggacggtagcctttgaagaatggagtgtgacgaccaccttcatctttgctcagaatataaacttctgattcaaatttgttgtgtgggttgattgaacctggtttcgccagtacttgtccacgttcgatttcttcacgttttgtaccacgcagcagaacacctacgttctcacctgcacgaccttcgtcaagtaatttacggaacatttcaacgccagtacaagttgttttggtggtttctttgataccaacaatctcaacttcatcacctactttgatgataccacgctctacacgaccagtaactactgtaccacggcctgagattgagaatacatcttcgattggtaacaggaatggtttgtcaattgcacgctctggctctgggatataagaatccagtgcttctgctaattcaacaatttttgcttcccactctgcttcgccttccagtgctttcagcgctgaaccacggattactggagtgtcatcacctgggaaatcgtattgagacagaagttcacgaacttccatttcaactaattctaacagctcttcatcatctaccatgtcacatttgttcaggaatacgatgatgtaaggaacaccaacctgacgacctaacaggatgtgctcacgagtttgtggcattggaccatcagttgctgctactaccagaatagctccgtccatttgcgcagcaccagtgatcatgtttttaacatagtcggcgtgacctgggcagtctacgtgtgcgtagtggcgagttggagtatcgtattctacgtgtgaagtagagatggtgataccacgcgctttttcttctggcgcattatcgatttggtcgaatgcacgagcagcaccaccgtaagttttagctaaaactgtagtgattgcagcagtcagagttgttttaccgtggtcaacgtggccgatagtaccaacgttaacgtgcggttttgaacgttcaaatttttctttagacacgactatattccttaatatcgctccctctcacagagggagcgtaaactaaattgaactcgaaaggatcttatttcgctttacgagcttcgataatagcctgagcgacgttgctaggcgcttcgttgtacttcaagaactccattgagtatgaagcacgaccctgagtttgtgaacgcaggtcagttgcataaccgaacatttcagccagtggtacttgtgcacgaatgatcttaccagtaggtagatcgtccataccttcaaccataccacgacgacggtttaagtcaccgataacgtcgcccatgtaatcttctggcgtttcaatctcaactttcatgattggctctaacagaatcggttttgctttcatgaaaccttctttaaaggccatagatgcagcaattttaaacgcgatctctgaggagtcaacatcatggtaagaaccgaagtgcagacgagctttgatatcaacaacagggtaaccggctaaaggacctgatttcagctgttcttggatacctttgtcaacagctgggatgaattctttaggaattacaccaccaacgatatcgttgacaaacacatagttctcttcaccacctgatggtaatgggctaaggtcaataacaacatgaccatactgaccacgaccaccagattgtttagcgtgtttaccttcaacgtcagtaatttcttcgcgaattgtttcacggtaagcaacttgtggtttacctacgttcgcttcaactttaaactcacgacgcatacggtcaactaacacgtctaagtgtagctcacccatacctgcgatgatagtctgtccagactcttcatcactagatacacggaaagatggatcttcttgagccagacggttcagagcgatacccattttttcttggtcagctttagtcttaggttcgatagcaacagagattactggctctgggaattccatacgttctaagatgattggtgcatcaattgcacacagtgtatcacctgtagtaacgtctttcagaccgatagcagcagcgatgtcacctgcacgaacttctttaatttcttcacgtttgttagcatgcatctgaacgatacggccaaaacgttcttttttgtctttaactgggttcagaactgtgtcaccagagtttacaacaccggaataaacacggaagaacgttaagttaccaacaaatgggtcagttgcgattttaaatgccagtgcagagaatggctcttcatcgcttgaatgacgttctgctggagtatctttaccatctggtaaaatacctttaattgcaggtacatctgttggtgctggcagatattcaataactgcatccagcatcgcctgaacacctttgttcttaaatgcagaaccacaggtaaccaggataatttcgttatctagaacgcgtttacgcagcgcagatttaatttctgcttctgacagttcttcaccgcccagatatttgtccatcagatcttctgatgcttcagctgcagattcgatcaggttgttgtgccactcttctgctagatcttgtaaatcagcaggaatgtcttcgtattcgaaggtgacgccttgatcttcttcattccagcgaatcgctttcattttgatcaggtcaacaacaccagtgaaatcttcttcagcgcctactgggatttgcagtggaactgggtttgcagctaaacgtgttttgatttgttcaactacacgtaagaagtttgcacccatacggtccattttgttaacgaacgcgatacgtggtacatgatatttgttagcctggcgccatactgtttctgactgaggctgaacaccaccaactgcacagtaaaccataaccgcgccatcaagaacacgcatagaacgttctacttcgatagtgaagtcaacgtgtcccggggtgtcgatgatgtttacacggtgaggctcaaactgtttagccataccagaccagaatgcagtagttgcagcggatgtgatagtgataccacgttcctgctcttgctccatccagtccattgttgctgaaccttcgtgagtttcaccaattttatggtttacaccggtataaaacagaatacgttcacttgtagtggttttaccggcgtcgatgtgcgcactaataccgatattacgatagcgtgctatgggggtttgacgagccattttttcctctctcgtgggcgttcaattcaggtaaaggacagcatagctgtcctgaaaagagttgcgactacttcgcggattaccagcggtagtgtgcgaacgccttgtttgcatctgccatacggtgaacgtcttcacgtttcttaacagcagcgcctttgttttcagccgcatcagataattcatttgccaggcgaagagccatggatttatcaccgcgtttacgagcagcttcaacaatccaacgcattgctaatgcattacgacgaactgggcgtacttcaactggaacttggtaagttgaaccaccaacacggcgggatttaacttccacagtaggacgtacgttatctaatgcgatttcgaacgcttccagttcagttttgcctgaacgctgagccagggtctctagcgcattataaacaatagattctgcagtagattttttaccgtctaccatcagaatgttaacaaatttggccagtagttctgatccgaacttaggatctggcagaattttacgttgaccaattacacgacgacgtggcatggaaatactccgtttaaaattcagggttgtccaaaactcgatgagtttattttgacattaattgtgaaaaaatgtttggccttacttaacggagaaccattaagcctttggcttcttcacaccgtacttagagcgaccttgtttacggtctttaacaccggaacagtccagcgcgccgcgaacagtgtggtaacgcacacctggtaagtctttaacacgaccaccacggataaggattacggagtgctcctgcaagttgtggccttcaccaccgatgtaggaagaaacttcgaaaccgttagtcaaacgaacacggcatactttacgcagtgctgagtttggttttttaggagtggtagtatatacacgagtacatacgccacgtttttgcgggcaagcttccagagctggaacgttgcttttaacaactttcgagctacgagatttgcgcaccagctgattaatagttgccatttaaaaaaagctcctggtttttgcttcgtaaacacggatttgaactctgtcttgtcgacaagacaaaacatgaggacgcagaattttattgctgacgagctcatgtgtcaagaattatacagcaattctacgcgccccagtgaatttgttgggggtgttttaccgttaaatcgacaaaatcaccataattgataagtttaatctgatgagaaacctgatcttttaggcctcgcgcgagaacatcatcaattaatgcataaacagaaatttgctgagccagacaataaattaataaaggattatcttcaagaacggctagtacaccatcttggattaataaaacttcatcatgctttgtcaataaagacaaaaatgcgtccaaatcactttggtaaatagagacggagtaagtatacaacataaccgttcatccttcttgactaactcatcattaaaaacgtaataccacgtcatagtgactcagtttctgagcaatctcttgagctgttataaccttggcgtcaagaataaacattgtttgtgacgataaaccacgatgagctagatcttcttgtgatatatagacgtttgtcacatcatacaaggggaggactttaaatgtagctgcatgatgacgagaaagaacgccttcaggctgttgattttccagtaattggaacacgccatcagaaagaaaaaaaacacctatattttcggttaaggcggaagttgctaatagcgcatctaaaccttcacgcccagcactattaccatgaggtgcctgagtaaagataaacgccacagaattcattttcttcattaaaactgcaccacacgatcacaagttaacatcgcttgagcgagggctcctaagccacttagctcaaactttgttgccatattgctgctcagtaacccctgctctttagcttgttgctcatcaacaacaccacgccgtaatgctgcagcaacacaaacctgcaaagggatattgtagcgtgaagccaatgctatccaggcttttggcaagtcaaattcatcacttgcgggtgagaccaattgattagcattggacacaccttcacgataaaaaaatacttgtgcgatgtgatgacctttttcaagtaacgctttagcaaataaataagcgctagaagcttgttccgtgccataatgtggcccagtcaccagcaagcaatatgtcagattcatcgtattactctattctccatttttaaattggcggatatagagatacacagtatgtttagaaatattcagtctatcagcaacctgatttatcgcgtctttgatatcaaagatccctttctcataaagatttaacaccacttgtttatttttcgcattattagccacttcacgatcgttattcacttcttcaatcgtaaattcaagtgtttgtgccacgagatcatcgacagaagaagcaaaattcacatcagaagccacttcatgagtttcttcaggaataaaggttttaataatctcagagaatgggacatcaaggttcatattaatacataataaaccaataacacggcgctcacgattacgaatagcgatcgtaattgatttcatcaaagcgccactttttgcacgggtaaaataagcttttgaaaaacttgaatcttcatctgtaatatcatgcaacatttgtaatgctaaatcggtaataggtgaaccaatcttacggcctgtatgttccccattcgcaattttaaccgctgaacatttcaaatcttccagagagtgcaatacgatttcgcagtgatgaccaattaacatggctaaaccatctactgcagcctcatatgactttaaaatttcgtgatcagtttgagtaaaaggtcggctatctagtttttcaaactcgttgctgtcaccatagaataacgggctagacatttgattatataatccttaaaggctttaattatgataatgacttgaggtcttattatttataatgattcatcttcatgaatcaattcaatattaaaatttaaatataaagtcctgtacaatcttgacgttaaatcgtcaagggatctacgtcaagagtcttagaataagagctttgtcataggtcacagctttgctttattttctttctatttttacattactcacgcatttctcttgataaaattaccctatttcggggatcaagaaaaagatcaatgaagctaagcacaccagttatatttaaatattatgctattttaagaagttgttaaccctattaatatgctaattatctaaaaattttaacaaatattataaaatatcgatccgcgggtgaaaccgactatatctacattttctctcgcttgttttatgcaaaagttgctaggaaaacagtttacctttagcactgttatgcacttctataatttatctggctagaatatattcattactatatgtatgcagagagattattactattgattctcctatcagaatgacataaccgttatctcgacattactgctgtttctacacacttttacaggtttacttatgtttttaggtcaatattgggcaaagtttgccccaactacgctttttgttctactttggagtagtggtgctattttttctcgttggggtttagataatggcagttcatttgccattttgacttggcgttttgttattgcattactgtttcttaccctactttgtctccaacgtcgccaatttcttccccctaaaggaagccgtttaaaaacagcatgggttggattgctcattatcggtggttactctatttgttacttgttagcgctcgctaacagtattacaccagggatgctcgccactattatgggtattcagccgatcctcactttatggatcattgaacgacactttactgcgagtcggttattaggactatttattgctttgataggattagtattagtggttgcgcagagtttatttaatacttcactctcattaacaggaatgatttatgcactcattgcactcctctgtatgagctttggcgcaatttcccaaaagaaattacaattagcgcctatggaggcattgccgatacaatatgtggttagtttaacgctatgcttattatttattccatttcaacctatgcagcaatcttgggatattggttttattgttcccgtactttggctagcaattattatttctgtcgtggcacaattactactctaccgactgttaactgcaggtaatctggttaatgtgactagcttattctatttagtaccgggagtaactgcgttaatggattatatcttcttaggcaataaaatgtcttggcttagcttagcggggatgggcgccattattattggtcttatttttgtatttaaaaagtctaactcgatgattgttgaagaaaaaataaaataaacaaacaaaaatgctggaatagtactccagcattttttcattaagcaactgattatttgtcgctttcaacactcagcaattcaacttcaaagactaatgttgagttagctggaatgccactcgttgcacgttgaccgtaacctaattcaggtggaataactaacttaatttttccgccttctttaatgtatttcataccttcagtccaacctgggataacacttttcaggctaatagttaaaggctctttacgatcataagaactatcaaattgtttaccgtcaatcagcatacctttatagttcacagtaacgcgatcggcatctgttggtgttttacctttacctggattttcaactaaatacagtaggcctgatttagttttaacaacacctttttcagccgcaaattctgtacggaatttatcaccagcagctttattctctgcagcttctttttccattttcgccgttgcaaccgtacgtacttgatcttcaaaagctgccagcgttaattcaatttctgcatctgataatttagatttattattaaaggcatcttgaacaccggctaataattgttttgaatctaaattaataccgatatttttttgttctgttaatgcagcttccatatagcgacccattgacgcgcctaaagcatatgcattctgctcatcctgagttttaaacgcgctatttaatgttggtactttagctgtctcttctgccagtgcatgaggtgcactaaatgcaaatgctaaacttgttgccaacaacgtcgtttttaataaagatttcatcccgttctccagtttatgttagtgagtcactacgcgttgcaaacgatcatcttaaatcttagcaaatacgttttgcatcacttctttctgtcgttgcggagtagatctcatccgcgggtaacaattttatatgaattaaaaatatttgccgacacccacaaccgttaatgttaggattttcgtcagcacagcgtgttaccacattaacaaaatagtcttttaactcaaaccagatttatgtcttactgtgtatatatcagtaaataatattaaattttactcagtaattcactatattagtcattatatgacatcacataacaaggagaaaaaaccatggacattaaggaaatagaagagttacttattcaattagagagtaaaattgctttccaagatgccaccatcgaagagttaaatcaggtggtcacacaacaacaaattgaaattagtcgttttaaagaggccttaaaaatcgtcaccgaacgattgaagtcatcccaatcatcaatgctcgctcgccctgaagatgagaccccaccacctcattattaacttcaagtgagactgtaggcaagaacaaaaaaggagcgttatcacgctcctttttcaatggtttcacaagattaatgttggcaaccacaaccgccatgaccgtggccgtgaccaccttttccatgaccgccaccacaacatccaccttcttcaccgtgatcgtgatcatgaccatgaccatgaccaccaccacagcatccgccttcttcaccgtggccatgtccgccacaacactcatgaccttcatcttcaccatgaacatgaccatgagctaattcttcttccgtggcttcacggatagcaacgatttctacatgaaacttcaggttttgacccgctaacatgtggttaccatcaacgataacttcgtcaccctcaataccggtaatttctactggtactgggccttgatctgtatcagctaagaagcgcatacccacttctaactcatcaacaccaacaaaaacatctttcggtacacgttgaactaagttttcatcgtattggccatatgcgtcatcagaagcgacttcaacgtcgaacttctcaccaacttcacgacccgttaatgcattttctaaaccactgattaaagaaccacggccatgtagatagtctagcggtgcactcaccggggactcatcaactaaaacaccgtcttctgttcttacttgataagccagactaactaccaagtcgtttgctactttcatgacatctcctacatacccgtgggcaaaattttcccgattgtaacgaaaaataaatcgtctgtatcgggttatatcaaaaaaacctacaattattgtggtgtaaagatcccgatgacctgttcattttcacgcacaagtgcactcacctcaccgtctgtttgcctttgctgatgaccacattgagcgcattccacaatatccactttatcttctcgccacattttgagtgtatcttgggcttgacagtggggacatactgcgccagcaataaaacgcttacgggttgcagacatggggtcagttctcctgtttatcaatgggtcttttttctctatttacttgagggatagcatcagttaacgattcgtcccaaatatcaggctggtggtgctcttgtctcatctcttcattaaacagctcttctaattcacgacgagcctctttaacacgtgaaacattcgagacttcttcgggtgattcgtccaccaactttcttaataactgcatatctagacgacgaaaatgctgttgtgcacgataggcctgatgtggatgcataccaagttcaattaaagttttacgtcctagctctaaagcactcgagaaggtttctcgactaaactctgttacccctgcttttaacagctcatgtgcttcaacccgtcctcttgctctggcaataatttgtaattgaggaaaatggcgctggcataaatggacaatttccattgtcgcttcaggctcattactggtgatcacaatggctttcgcgtgttcagcccccgcagcacgtaataaattcaagtctgtcgcatcgccataataaactttataaccatatttacgcatggtacttaaactaccaacgtcatgctctaatacggtcacattgactttatttgccataagtaggcgcccgactacctgtcccatacgaccaaagcccaccaggatcacttctggatggttattttcaacaaaaggctcttcgtctatctttgcatcattataacggcgcgataacacggcgtctgtcatttgcatcacaagtggcgtagtcatcattgaaagcgttacgacaaccaaaagcaatgccatctgttcactatttaatacccccatcgccatagaggtagaaaaaacaacaaaagcaaattcaccgccttggcttaatacggctgaaaattgcaaacgtgtcgaaaagcgtaatctcgctaaccaagcgataccataaagtaccaaccctttaatcaagactaaaatgacaacgcccagtaacacttgcggtaaataatgccacaatatacctatatcgagggacatgccgacggagataaaaaacaaccctaacaataagcctttaaaaggttcaatcgagatttctaattcatgacgatattcagagtcagctaataatacccctgcaataaaagttcccatcgccatggaaaagccaatcatttccataaagagtgctgaccctaataccactaatagcgcaccggcggtaaaaacttctctcacacccgatttaacaattaagcgaaatagtgggcgcaataaatagcggccacaaattaataatgcagcgaatgagactatttttagggcaatacgataccaatcactactggctgtttcgccagcaagtaaagggatcaccgcaagaataggaataacggccatatcttgaaagagtaaaaccgcaaaacccaactgccctccttcgttatgattcattcctttttcattcatcaattgtaaagccatcgcagttgatgacatggcgatacctaggccaccaatcaatgctgcttgccacgaaaaagaagttaagagtaaaagtagccctgtgataacagatgcagtaaagacaacctgcatggcgccgacaccaaatattgctcgccgtaactcccaaagcttagctggatttaactccagcccaatcaggaacattaaaaaaacaacccctaattcagaaaagtgtaagatgtaatcaacatctttaaataaccctaatccccaagggccaatcgcaataccagcaattaaatagcctaataccgcaccaatttttaagcgttgtgcaatggggaccataatcacggcagcacataagaaaaacagcacggcttttatcatccaattaccttccatccgcgtgttccccctctaacggtgcttgtaaccattggcgataagcatcactaatatgccctagtgttgttttggactgttgccttgcggagtaaataatcatcggcgataaccagcgcataccacacatttccgccattaactcgataggacgcaataattcagatagtgtgtagtgatttttaccattatgttgataagcatgttcaggctcaccagtagtcaccacacaacggaatgtttttcctttaagttgagctcgtccaactttattagcaaaaggacgcgtgagcactctatcttgccactcttttaatagcgcaggacaactataagtttgtaatggaaactgaaatacaatgacttgatgttgacacaatagtgcttgctcacggtgaatatcgataaaaaaatcagggtaagtggcatataaatcatgaattgttatattttccagatccctcaccgcacgcaacaacgctttattggcgatagattgacgcggctcgggatggacatacaccagtaaaacatttgatgcgtttgacatcattcctccttacaaaacgtgtcagaaacctttttttccgttaccatgcacgcattgtgaccaactgttacgaacaacttactctatatattaatttacatactcttaatagacgacatttatgattgttttttcttctttgcaaattcgccgcggtgtcagggtattacttgataatgccagcgcaacgattaatccaggacaaaagattggtcttgtgggtaaaaatggctgtggcaaaaccacactgctctctttattaaaaggggatctacaagctgaagcgggtaatgtgacatttcctagcacttggtcaatggcatgggtaaatcaagagacacccgctttagacgttcctgccattgattatgttattgatggtgatagagaataccgcgaattggagcgtcgtctacaacaggcgaacgacaataacgatggtcatgctattgccctgatccacggccaactcgatgctattaatgcgtggactatccaatcacgtgcagccacattacttaatggcttgggattcagccaacaacaactcactgagccagtaaaatcattttctggtggttggcgaatgcgcttaaacttagcacaggcactaatttgtcgttctgatctattactacttgatgaaccgactaaccacttagatttagatgcggtaatttggctagaaaaatggctaaaaagttataatggtacgttgattttaatttcccacgaccgagattttcttgatccgattgtggataaaatcttacatattgaacaagagaaaatatttgaatattcaggtaactactcttcgtttgaaatgcaacgtgcaacaaaattggcacaacaacaagcactctttgaaaatcagcaagcaaaaattgcccatttacaaagttttattgaccgctttaaggcgaaagcaactaaagccaaacaggcacaaagccgtgtcaaaatgcttgaacgtatggagcgagtggcgcctgcgcactcagataacccgttccagtttagttttcgccaaccagaaagcttaccaaatccgcttctgtctatggaaaaagtcagtgccggttacggtgataagattatccttaataacatcaaacttaacttaattcccggctcacgaattgggctcttaggccgtaatggtgcaggtaaatctacattaattaagctgttagctggagaattagctccactacaaggaaaggttgccctttccaaagggatcaaattaggttatttcgcccagcatcagctggaatatttacgtgccgatgaatctgcattacaacatttaactcgtttagcgccacaagagactgagcaaaaattacgtgattatctaggagggtttggtttccatggtgataaagtcaccgatgcatgtggccaattttctggtggtgaaaaagcacgtttagttttatcgctactggtttggcaacgcccaaatttactactaatggatgaaccaaccaaccaccttgatttagatatgcgacaagcattaacacaagcgctaattagctttgaaggtgcgattgttgtggtatcccatgacaggcatttattacgctcaaccacagacgatttatatctcgtccatgacggtcaagtagagccatttgaaggcgatcttgatgattatcagcagtggttagttgatcaaaatcgccaagagactcaagctaataaaacgcaacccgatcaagaaacaacaaacgtctctaacttaacggctcaagataaaaaagagcaaaagcgtaaagaggcggagtttagacaacaaactcaacctttgcgcaaaaagctaaccacattagaaagtaaaatggataagcttagccaagagctgaccgccatcgaaactgagctttctgatagtcaaatttatgaagcgaagaacaaggcgacgcttaccgattgcttaagccgtcaaagtattgccaaatcggctttagaagaagttgagatggcgtggatggaattacaagaaaaactagaagagatgaccaacgcttttgagtctcaataactatttttcattaatgcctaaaaaggaactattaaaataatatagttccttttcattaaaatacatttaaaaaatttatataactcatttaacttaacgcctttatttcctgtcacattagcacgttttacacaaaattatatcctcaccttgtacgcaattatccaatttaaatagttatctatcatttatttacccattatttgtattaagtaagggaaatactcattttctagctaaagtttttaatctaccagccgaattaatcattctgctaagtggagctcccactggcgaagaaaaaggccaagctaataggtagggttatgttaaaacgaattaaaatctctcaaggtttaatgtgtgtcctgactctgttttgtattattcaggtaatatctggagtacaaagcattcacgatgcctaccaaactcaaaacaaattaaaacaaatctcatacagtttcgaccagttacgcactatggataacacctacgcggcgttaaatactttacgtactgatattattgcgcaggcgtttagttatattgctaatccacaggtggaagatgccaatattactacattcatgcaaacaatggatgcacgtaaggcagaggtggatacgttgatgaatgaatatgtcgaactatctgcacaaactggatttgatcagcaacgcatggcagagatcaaacaactttatcaaaaaagtcgttatgacttagatcttcttgtgcaatatttaaatgaacgtaataccaatgcaattcgtttgatcttaaaaagtccagccaacgataacttcactaattcattatatgaagcaacagatttcattactgatgacgttgttaatccgtcagtgattgaagcagaagataactatcacgagatgctatggatagcctccctattcatgggcatattcctgatatttacgacattagtgctcttttggatccgtaaacatattattgtacgcattaaccaaatgattgaatatcaagaggcgattgctagtggagatttaattagtcgcattgaccatgatattacaggccgcaatgaaatagaccaacttatgttgggtttacaacaaatgcgagcgcgcttaaaagaaatggttagcgctatccgtaacagtagtacaacgatttatagtggtgttcaagaaattgccgcaggtaataacgatttatcaagtcgtaccgaagaacaagccagtgctttagaagaaacggcttccagtatggaacagcttaccgcaacagtcagaaataataccgaaagcgcacgtgaagtcactcagttagtcatgagcacagcagatattgccgttcaaggtggtgagcatagcaataagatggtgatgaccatgacagacattgccgatcgttcgcaaaaaattggtgagatcaccgcagtgattgatgatatcgcttttcaaaccaatatattagcactcaatgccgcagtagaagcagccagagccggtgagcaaggacgcggtttttctgtggtagccagtgaggtacgtaatttggcgcaacgtagtgcggaggcggcaaaagagataaaagaactcattgaatcaactattttacgagtaaaacagggtaatgatcttgtcgaacaagtcagcttatctatgggagagatcgtcacatcagttaaccatgtatcaggctcgatgaaagagattttagcagcatcagaagagcaaactcgtggcattgctcagattagccttgcagttaatgaaatggataaagcgacacaacaaaatgccgcgatggtggaacaatctacagcggcttcagcaacactaagtgaacaagcctcaatgttagatatgattgtaaataccttcaaggtagaacaagtcgcggttacatcaccacgatcaccaacattctcggctaagccagctgaaccggaaataacaaaaacagcaacaacatccacaataaaatcccatcatcatgaagccgatgacaattgggaaagtttttaagctaaataacctacaataatattaacctgcgacaacgtttaaataacacgttacatctgtattaaagacctctaccgttaataccttcaatcaaataagattggaggtatttcttaaaatcaattataaattttcccattctatataggttataaaagtcagacagcactttgattgctgatatttttctttctcatcaatcattagaaacttttaattactaataattcgccttgctaataaatcatttttttcctctagcaccttacaccaatcattagaaaattttagttattagcggttaattaaagcgaaaaaaagcaaaataagtcgttttcagtcacaaaatagataaaaaaagtaaagttttcaattattaagccgaataaatttaactgatgtatgtttgtcgttccttgctctttatcctacaaattaatgaaataggtaaggctatgcttaaacgaataaaaatatctagtggcttaatgtttattttgatcttgttttgtgccattcagttgttttctggtgctacaggcattcgtgatgcttatttaactaataagcgaatttcacagttagccgatggttttgaacagataaaaaccatggattatggttatgccgcattaaataaattacgtgaagatatgcttaatgtaatgtttgatgctcatctcaccccagatcttgctgaaagcaaaattacagatttcctctcctcttaccctcaacgaaaaaaagaagtctctagcattattacccaatattttacctccgctgaaaatgccgattttgatcgcgaaaaagtggcgaaaatgaaaaaactatttcagcgtgtcatttacgatcttgaccagctcgtttcatgtttagaaatacgagattattacggtttccaatctctttatgctcacaatacgaatgagcggttcacacaatcactttatgaggcaacggatcatcttagtgataatgtcgtcaaccacgctatagaagccgcacagggtaattatcaacgcgcgttgatcttcgcgtttatttttatgtcggtatttatcttatttacggtgtttgtcatgttgtggatacgccaccatatcgtgttacgtattaaacaagtcattgattatatgtcagatatctcacaagggaatttacttgaaaatagcaccataaaagccaaaggtaataatgagatagaccaacttattaatggaatacagtatatgcggtctgaattatcactgatagtcaatgctattcgcggaacaagtcatcatatttataatggtgtacaagagctcagtgctggtaataacgatctatctagtcgtactcaagagcaagcgagtgctttagaagaaaccgcttctagtatggagcaactaaccgccacagtaaaaaataatactgaaagtgctcgtgaagtatcacaccttatcaatcaaacctctaatattgccagtaaagggggggatgttacccatagaatggtaaaaaccatgaacgatattgcacaaagctctcaaaagattggcgagatcacaacggttatcaacagcattgcttttcaaaccaatatattatcactcaatgctgcggtagaagcggccagagcaggagagcaaggacgtggtttttctgttgttgccacagaagtaagagaattggcgcaacgcagtgcagaggcggcaaaagagatcaaagagcttattgatgcgtcgattaaccgcgtcaaacaaggtaatcaactggttgaacaagtcagtacttcaatggatgagatcctcacatcagttaaacatgttgaaagctcaatgactgagatcctatctgcatcagaagaacaaacgcgaggcatttctcaagtctccttagccgtcactgaaatggataaagcgacacaacaaaatgccgcaatggtggagcaatcttctgctgtagcgagtttactaaccgaagaggcgggtgatcttgagcaaattgttgagcaatttaaaacagcggaaagtctattttcgaagaagagtacattaacaaaacccgttgagaaatcagccaatattgggttatcgcccataaaagaaaatcaacaagactcaagaataaaagagccaaaaaaccataaccaatcgacattcaaagaagatgaagatgatgattggacaagtttttaacaagtgctaatctatttatatgtatatcaacacctcataaaaatgaggtgttgatatactattataaactgtgaaattgggctttaatactatgtgtgatttagcgattaaaataatactgcaatatttttatagtatttaacagagaagtttaagtagtaaattcgctcatttcgcatcatgattcttatctgagtctaaattgttaattaagcataaggatatttgcatggatgatgatataaatattagaccttttgattataatgatattggtagagtctatgactttaaatcaccattagttgaaggagagtattttgctctagaattaactgacactataccatcagggtcagtacctgtcgtcgatgaagattccggaatgtgcataggctatctatatggcatatctggagtttatgatgtttatgatgcaactggtgaatatttaggtaaatatgaactacctttagtatcaccattaattgatcctttagatataattttacttgggggatggtttgttaaaaatggagcgaagctcactactttacttaaaggaggtggtacatctttagtcaaagcaggaactattaaattaacagatcatttaatttcacttttacgtggacgactaaaaataggattatcacctagaactttaaaattcacacctaaagccgcatctcacatggctgaagcagaaagatatgttccaataacaattattgaaaaagcaataagatatggtcagagagggatagacactaaaggtagatctgctttaatacttaaaagatatattatcaaaataaaaaagtatcgttactcatcaaaaataaaaaatcttaatggtaaaaatataaatgaagtaaaagaatatactttagaagttgttgttgatgaaaaaacatggaccgttactcattttatgtataaatagaggtaatatgtttagtataaacaatgaaataaataatataaagttttctattattgatatacacgatttctctattgatagtgaacaatactctgaatatgataaatcatttacttttaatatagaattaacccttaaaaacggtttttttaatgtttttaattgtgaattttattattttgaattaagtgattttgtcgataatattttagatattataaacaacgttagtcataaatgtttattcacagatgagagaaacataattaacatttcctttaaaaaaataaaaaactctagcgacatttcagttcactataagttatttgaatacttcgatagtgactgctatataactggaatatttattatttctaaagaaaaactatatgacattataaatgatataaaaccttatctattagagaagaaagcatctacttagtagatactttcttctctaatactatatcctgatgtggatgccgctaaatgcctccatgtgatatctctataatctaacaatatgatttcttccggttgtctgtcattatgagatattgaattaggataatcataagttatattttttatggtggcctgttgtaatgatatactgtagtacttttcttgagcgccattttgactagttctaaaaaattctagtttgcaatctattaactcattattagatatggcgacacctagcagtggcgatgatttatcgatgggttttactatttcgaatggatgatgatgagagttttgggctcgagatatcgaatgtctaatagctaatacaagtatttcatcctcatgacctttttggtatttatttccaattgaatcatatgttgaacaccctttagatattaatccttgttgttccccagttagggtcatgtatataatgttagccatgtgattttcctattttatattttcaatattttatatataacttaagtcaggacaaaaaacaatcaaaaatccaaatatagtaaaatctcaaatgaaagaaataagagacactattttttccataattaattatttaatacaatttaatcaaataattacacctcataaaaatgaggtgttttatattatctgtaagatctctacctattttctctcttctacttttcttattatttagtgaaatacatgaatggcttttactaaataattcgtttgttctttcatttctccggaaattgatgacgctttagagacataatctgcattttcatgtgttattgattctaactgctctacagctcgaccgagctcttttaatcctgcactttgttctgatgatgcaaggctgatttcaccaataagactcgtgacattttttacatgaaccacaatattttccattgtttccaccgtctcatttacttgctttgagccaatcttaatattgttacttgatgtattaatcaatgctttgatctcttttgccgcctctgcactgcgttgcgctaaattacgcacctcactggctaccacagagaaaccgcgtccttgctctcctgctctggcggcttccaccgaagcgtttaatgccaatatgttggtttgaaatgcaatactgtcaatgacaccaataatattactgatacgctcagaacttttcgcaatatcgtccatcgtatgcacaatagtatccattgctgttccgccttgtattgctgccttgcaagtcatattagataaattattagcctgccctgccgtttcactattattactcaccgctgtggttaattgattcatggttgacgcagtagtctcaacatgacttgcagtttgttcagtcctcgtatagagatcacgattccccgctgctaattgatcacaagaaaaagcaacttgatggatttgatgactgacatcgttcacaagccaacgaaacatccgccctaattggtttacagaacgttgagtcataccaatttcatcaatacgatcaagataatcaacgttgtgttcatcacctgtagccacccgattagcatgtttattaaggatcataatcggcttcactacttgaaaataaaaaattcgctcattggctatcaatagtgaaagtaagatagcggtatgaatgaataaaccccaaccatttaaaccagcaaaccaaacacttaataatataaaaggaaatggtaataagagaagtaagcgtacacgctgctttagtgagagtgtttgtttccatgagcgccaacttttccagcccttataaatgaatacccccttagaaaaagtgtgagagggatatttaccttggttaaaagcggcatacagtgctgcggcttgttctacttcttctttttttgccgccgtcctcactgacataaaactttgaattttaccttgacgaataataggggtgacattagcccttacccaataatgatcgccatttttgcgcctatttttaactattcccgtccaaacctccccctgttttaatgttttccacatgtctctaaatacatcagcaggaatatctggatgtctgacaatattatggggttgccccattaactcttgtgctgaaaaaccactgacttcaacaaaatcctcattagcataaataatattgccattaacatcggttgttgacatcagtgttgcgttttcagctaccggatattctcgctgtgtcaccggttgattgttacgcattagttactctcctcgtcattgaaatgagatatctcaataaaaaaacacgtgctaaataactaacgtttcggctacaaagagaataactttagaaataagtataaatattaacttttaaatattaaaaatttgaatcagttcaaataaattaatcatccagactattaattagtgcttgagagcttaatactaaagccttcgcattttcatcacgcttctttaataatgccataaagataagatcggtaatggtgttttgtgcagtgcgagaagaaatagcagcactacgccactcaccttcatcagcaatagtttctaatatataatcggccatcagacctagtggtgaatgtttttctcctgtgatcgctataattttagcaccttgttttttagccacagatgcagcgaccagcatatcttttcttttgccactgtaagagatcacaatttgtaaatcccgagggcttaacatctgagcaacagaaatttgtacatggtgatcagtttcaattaaagtcgtaatacctattttctgtaatttataacttaaatctctggcaactaaacctgatccaccaatacctataatttgtacccgagaggcgtcatcaatctgttggatcacttgttcaaactggtgataattaatttgacgtgtggtatcccgaattgaattatttttttcttgtgctaatttctgcgcaataacaaccaggctatcctctgagtctatttggttatgtaatatgctggagtttttttctgaattagcattttttcggcctaaatcttcactgatagccagctttaaagaaggaaatcctttaaatcctatcttttgactaaatttcactattgctgattggctgactcccataatttcggctaattgctgtgatgataaagtcacgattttttcagggtgttctaaaatataatccgctattttacgttgatttgtcgccatccctggttttatccacgctatcttcgttaatgtaggcataatgacataatccacttaaattatactatttttataatgatttaattattaacaaatttaattgtattaaataattaattattgatggtaaagtgaataaaaaacatcatctactcaatagaaaatgttaataatattaacaatacctttataataattctgtttatgattttatctaaaattttacgtataagcacatctatttttaaacgaattataaataatgcttaaattttttttagttttttgaaataatttattccttaatatcactgcagataaaattccattaaatatcaatatatagcataataaaaattttttatcccattgataaataatcataaaattaatgttaataaaaataaacaaccaataaacactcaacaactatggtcaatcaaacggaataaataattccttgtcacagctacgattaaaattaaagataaaataatcaagaaatacacaaaacaacactttaatcatacttaatattattaatagataatcatcaacaacggtaataaataattatgtgtaatgtgtgattaaataacatatttgggtataataataatcgtagaaaatgactcaacatagctaaattagctaattaaacgcaatacaacaaaacaagagactaactaaactaaaaaaaatattatttacaacaataaaaagaaattaaatcatttattttagcctatatttattcaatccaaatcaatggaatacacatggcggttaatatccccattataatattaaatgagaaccatgctcgtctgctttgtaaaaaacgactgataaatgttccacctaaaatccataccataccagcgataaaattaaccaacaacatcacaacactaatcacaccaatcgatcccaaataaccatcaccggctaaactaaaacttcctacggcgcctagccccatcatccaagcttttggatttaaaaattgcaataatccaccttgaaacgccgtcactgtttggggcactttacttgaaatatctaatcgttgataagaagcggttgctgttttccaagctaaccaacaaagataaatgctaccaataatctttaaaccgatatgcaatgcgggataaataatcaataatgtcgcaataccaaacgcagagctaagtaatacacattgcattccgacgataatgcctgccatcaacgttaaagagcgttttaaaccaacatgagcccccgaagaggttaatagtaaattattaggtccgggcgtaatagctgcaataaaaaggaaaacgctcaacgaaacaactaggctatttgtcatagtgaaatgctcaaagatgtgacagatgttttattttcaccgaaaatagcagtatgttatttagcaaacaagcattaattcattttaataaacggaactatgtctcaatattttgatccaataccttgggctaagaatccccatttacagacacttttgcctcgaatagtgcgaagaacgccactattaacgccttattggcaacggcttaatttgcctgataatgattttgtcgacttagcatggagtgaagaacccaaaacagcgcaacataagccccgtttagttatctttcatggtttggaaggtaactttaatagcccttatgttcacggcatgctagccgcggcgaaagcgcgaggatggctaggtgttgtcatgcattttcgaggctgcagtggcgaacccaatcggcaaaaacgcatttatcattctggtgaaacagaagatgcccgctattttctgaattggttaaaagagcaatttggcgaacaaccaaccgcagcggtaggttactctttaggaggcaatatgctggcctattatcttgccgaaagtggtgaaaatgcggtattagatgccgctgttattgtgtccgcacctttgatgttagaaccttgctcaaccaaaatagagcgaggattttcgcgcttctatcaatggtatttactgaaagggttaaaacgcaatgcaactcgcaaattgatccgctatccccaatcgttacctattagtctattaaccattaaatccattaaaaagttacgtcaatttgatgatctgatcacggcaaaaattcacggtttcaaagacgcccttgattattatcgtcaatgtagcgctctccctttactcaatcagatcaaaaaaaatacacttatcattcacgccaaagatgatccctttatgtctacagaagtgatacctgatatcacaacattacccaaaaatattgaataccaattaacagaatttggtgggcatgtaggttttgttagtggaaaactctctaagcctgtaatgtggcttgaaaaacgtatccccgactggctatcaacctatttggagaaagtaaaatgatcatcccttggcaagaactatcaaccgaaacgctagataacttgattgaaagtttcgttttacgagaagggactgattatggtatgcaagagaaaacgcttgaacagaaagttgccgacgtaaaaaaacaactcgtctcgggtgaggccgtgttagtgtggtctgagcttcatgaaagcgtcaacattatgccagctgcacagtttcgccctgattgatcttacctaagttggcactatcacatcacatttaacaataaggtatagcccttattttgaaaaggaacatgatatgtcaatcaaacaccctattattgctgttactggttcaagtggtgcaggtactactacaaccagccaagcttttcgtaaaatatttcagcaactcaacgcccatgcagcctctattgaaggggatagttttcaccgttatacacgccctgaaatggatatggccattagaaaagcgaaagagcaaggacggcatatcagctattttggccctgaagccaatgactttaatttattaagttcaaccctaagtcactatagccaaacagggcaagggcaatttcgcaaatatcttcattcttatgatgaagcaaccccttataaccaattacccgggacatttacaccttgggaagcattgccagaaaaaacagatattttattttatgagggattgcatggtggagtcgttaccgatcaacataatgtcgctcaacacgttgacctattagtcggtgttgtgcctattgttaaccttgaatggatacaaaaattaattagagacaccacagagcgcgggcactctcaagaagcggtgagagattctgtggtacgttcgatggatgattatatcagttacatcattccacagttttctcgcactcatatcaatttccaacgcgttcctacggtggatacctctaatcccttctcagctaaagctattccaacactggatgaaagttttattgttattcgctttcgtggcttaacggatatcgatttcccctatctattggcaatgttgcatggttcatttatgtcgactatcaatactattgttgttccaggagggaaattaggcttagcgatggaattaatcatggcaccactggtgaagaaattattgaatggtgaaaaaattagctaaaatagatatgttatttgtgacgaaaataatatccccgtattttagggatattattttatatattaaaatttattttaaaatatcaaatttattcaggatctttaatttcaaaagagtgcgtaatattggccgcttttcctaacattaaagaaacagagcaatatttttctgctgataattgtacagctcgctcaacaattttatctgtcaacgctttaccggaaacaatgaaatgtaaattaatatcagtaaataaacgaggtgcctcttcacgacgttttgatgttaatttcacttcacaatcagtgacttggtggcgacctttacgtaagatactcaccacatcaatagcactacaaccacccgcagcaattaataccatttccatcggactaggcgctttatcacctgaattaccatccatcataacttgatggccggaagatgattcgccaacaaaagataaatcttcaacccatttaacacgtgcttccattttatttttcccctaaatacaactgagactaaaagagtacattctcataattcaactagcaattagcaaataggtttattatgctgactgcgtaaaacgagacttaatgcgttaactgtgttaaaaacaatatctgcttgatgatagtggttaagatcaatgcattattttctcatttattataatctattccttattaactttccgaattctcaggaagttaatcggtaaagataggattttaagcacgctgtatcaaaagggtgtcaatccgttttgaaaggctgcattaacgtacagaggataacgcgaatggttctcggcaagccgcaaacagacccgactcttgaatggtttttgtcacactgccatattcacaaatatccatccaagagcacgctgatccaccaaggtgaaaaagcggaaacactttattatattgttaaaggttccgtggctgttcttattaaagatgaagaaggaaaagagatgatcctttcctacctaaaccaaggtgacttcatcggtgaacttggattatttgaagaagatcaagaacgtagtgcatgggttagagcaaaaacagcctgtgaagtagcagaaatttcctataaaaaattccgccaattaattcaggtcaatcctgacattctgatgcgcctttccgctcaaatggcgaatagattacaaaccacatcagaaaaagtaggtaaccttgctttccttgatgtaacaggtcgtattgcacaaactttattaaatttagctaaacaacctgatgcaatgacgcatcctgatggcatgcaaattaaaattacacgtcaggaaatcggtcaaattgtaggttgttcacgtgaaactgtaggccgtattttaaaaatgctggaagatcaaaacctcatttcagcacacggtaaaactatcgttgtttacggtactcgttaagttgcattgaaaacagcccatttaactgatggacagtgattattttgtatgaagccccatcgcaatgatggggttttacatttgaattcactctgcttttacaaactcatcaagcgcttttcgtaacgcattcatgccctcttgtaactcttcgagggtaataatcagcgatggtgtaaagcgtattacatcagccccggcatttaatatcattaagccatgcttagaggccagtgcaagtaactcttttgctttacctgcatacagtggtgctaactgcgcgccaattaataagccttgtccacgaatttgagaaaacacagcataagtttggtttatcgcctgcaattcatccactatccaacgatgacgctcactgacaccttctaataccgcctgagtgttgattaaatcaaaagcagcattgcctactgcacaggctaatgggttccccccataagtcgtaccatgtgttcctacccccattaccgaagcgatatcctcggtggttaacatcgcactgagaggaaaaccactacctaatgctttggcactggtaataatatcgggctgtatatcatagtgcatataagcaaatagtttgccggttcgccccatacccgtttgtacttcatcaagaattaatagcgcttgatgcttatcacatagtgtacgtaagccatgcataaactccgctgtcgccggtgtcactccgccctcaccttggataggctccagtattacggcacaagtatgagagtcaatcacggcttttacagcatcaagagagttaaaagggacatgtataatatccgcaggtttaggaccaaaaccatccgcatatttaggttgtcccccaacagagactgtaaaaaatgttctaccatgaaaggcgtggtggaaggcaattatcttcgttttataaggattatgacgggtaatagcgtaatgtcgtgctaatttaagtgcggcttcattcgcttctgccccagaattggcaaaaaagacacgttcagcaaaagtatgttggattaatttctgagctaaacataatgccggctcattagtaaacacattacttacatgccaaagcttctcactttgctcttgcagtgctttattcaatagtggatgcgcatgcccaagcgctagaacagcaataccaccagcaaaatcaatataggattttccctgttgatcccaaacacggctaccttgccctttaacaggaataaaatctgctggtgaataaattggcaacattacctgatcgtaagttgccctattaatacgttgatttatcattaccccacctgaccgacatttagctatacaatgaaaatataatcactaaatatgaataaaaaatcaaataaggtttgatataaaagtggataatgacgctaaattttcattatccaattaatatttaagaaaattatttaataactcatgcccttgttcactcagaatactttcaggatgaaattgcacaccttcaatgggtaaagtacgatgacgtatccccataatttcatcaacattcccgtcatgttggctccatgctgtaacctcaaaagggacaggcaaggttgtcgcatcaatcactaaagagtgataacgggtaacgcttaaaggtcgattaagccctttaaacaccccttgctgattatggtgtattaatgaatttttgccatgcatcacttcacgggctctgataacggatgcaccaaaagcttgcccaatcgcctgatgaccaaggcaaacacctaaaataggtatttccccggcaaatcgctgtatcgcctcaagagagatccctgcttcatctggcgtgcaaggtcccggagagataacaagatgtgatggcatcatcttttctatctctttaagcccaatctcatcattacgtttaacaacaacctccgcccccagttcacaaaaatactggtaaaggttgtaggtaaacgagtcgtaattatcaataagtaacagcatattagcttatccgactgattttattatcattatctgttttaatgctattttgaaaccgttatatccctgacaaaatagctcgttattcaaccgacctggatacaacgaagccgattatcatagcacaggtgtaaaatataaatagtaagtaagaaaagctgttgatttattgcgcaataacaataatgacggtgattattcatcaattaagagataaataaagcaaacaagcgcggtactagaagatcatatgtcaaaaacaaagatcagaaataatttttttgatcgacaatatccagaatgtgagaacgcattctggatatctgttcattgactggcttaggctagagaagtgtctaacctaatcacccattattctttaaccacctcagcggataaaatcgtcacggttttaacgggtacattttggtaaggaccaatattgcgggtttgcacttgtgaaattttatcgacaacatccatgcctttcactactttaccaaacaccgcataaccaaaatcacgttgaccgtgatctaaaaaggcattatcagcaacattaataaagaattggcttgtggcactgtctttatctgatgtacgagccattgcaatggtgccttttaagttacgtaagccattatcagcctcattcttaatcggctctcgtgtctgcttttgttgcaaatctgccgtaaatcccccaccttggatcataaatccggggatcactcgatgaaaagtggtcccgttatagtaaccatcttcgacatactgaataaaatttttcgttgtgataggggcttttttattatccagtgacagttcaatattgccttcagatgtgactaatttaacaaaggtctctcccgttgcagccattgcaaggcttgtggttgtcaaggtgcaagcggtaacgagagtgacaaaaaaacgttttaacatgcagggatcctttactttaatagtctacaacttacttaatatgcagcgattttaattcgctggggcaaatagtgccaatcatttacctttatttacgcacaataaacgcatttacatcataacagggtaaattttcatgtttaattactgttataagtcgctaaattacgccaaaatagagggaatagttaattaatcgattttcgattctctatgcaaaactcatcttagtatgcatgaggaagcgcattatttcagagaggcttataccataatgacccaatttaattaccaaaaagcacatttcattatcagtgcacctgatatccgccatttaccaccagatacaggaattgaaattgcctttgcgggtcgttctaatgcgggtaaatccagtgcgttaaatgcactaacgcaacaaaatggattggcaagaaccagtaaaacacccggtcgtactcaacttatcaatctgtttcaaattgaggaaggacgacgtttagtcgatttacctggctacggatatgctcaagtccccgaagagatgaaacgcaaatggcaacgctctttaggtgaatacctgcaaaaaagagagtgcttaaaaggagttgttattttaatggatatccgtcatccattaaaagatctcgatatgcagatgattgattgggcggtggattcagagcttccgactctcgtcttgctcactaaagcggataaattagcatcaggggcacgtaaaaagcagttaatggcggtacaaaatgcactgtcagaaaaatcaggtgatatacgtgttgaatgtttttcttctttgaaaaaaataggcattgataaattacgtaatacgttaaatgagtggtttactgatactaacgaaccagagacagaagcttaactcactatccgctttattaggggaaaatatggcttccccttccattcttagcattaatcactcgtgcaaattttagataaaaaaatgccccagtcgaaataaagtcgactggggcagctaatattcagctaaatccgattacgtgaagtaaaaggtctgaaagatagaacatcttacctctgtaccctacaagagataatgtactctatttttttggctaataaaagcccttttgtaattttttttcacatgcaaacacgattcagcttgatgtttatgtattcaaacgctcaataaatgtagtttaattacatatttatgagatctaaatcacctgtaaaaagtgcttaaaaataaaacaaatcacacaaaatgtgcggtttatacaaactaattttgtgataggcttatcgcgagaccgtaataaatttgtaaattagcgataaaatgaggtattcatggctgtattaacgctactgcattttcctgatgagcgactacgcaaagttgctacacctgtggaaaaagtagatgacgaaatacgcacattaatcgatgacatgattgaaaccatgtacgcagaaagaggaattggcttagcggctcctcaggttaatgtctctaaacgtattgtcgttattgatgtttctgaaaatagagatcaacccattgctcttattaacccagaaattatcagtactgaagatgaaataatggatatgatggatggttgtctttctatcccagactcttttgctcccacacaacgctttcgctacttaaaagtcaaagcactagatagaaatggtgatgaaatcgagctagaagcagccgatctctttgctggctgtattcaacatgagctagatcacctcaatggtaaactatttatagaccatttatcgccgttaaaacgtcaacgtatcgagaaaaaacagaaaaaattaagcaaactcaacagcacccaagttgcttaatggaatgtatttaacttttgatattgttaatactaatgacttttatagtgtaagctcagtcaaacaactgggctttttattttttatccccccacacttcctattgccccttccctagctttaaatatagcaaagcgggaaaaccttatggctatcccgcttaaattcatcagttaaaaaaccattctgatatctattataaacaaagtgttatctcgtcattaatgggcttcatcccagttattaccgactccgacttcgactttcagtggaatagcaagctccatgctactttccatgagcttatggatcatcgcatttgctttttctaaatatgactctcgtacctcaaacactaattcatcgtgtacctgcataatcatatgtacatcatcagggcattcatgacagatccaattatccaccgcaatcattgcttttttaatgatatcggctgccgttccctgcataggtgcgttaatcgcttcacgctctgatgctttacgtcggatcgcatttttagagttaatctctggcagatataaacggcgtccatctaacgtttccacatagccttgctgtgacgcttgtttacgggtacgctccatataatctaatacccctggataacgttcaaaatagagatccatatatcgctgtgcttcttttcgttcaacaccaatctgctgtgataaaccaaatgcgctcataccataaataagaccaaagttgatcgctttcgcactacgacgttgttcagaggtgacttcgtctaaaggtataccaaacacttcagatgcagtagctcggtgaatatctttcccttgagcaaaagcatcaagcaaacctttatcttgcgataaatgcgccataatacgtaattcgatttgagaatagtcggcagcaactattttaaaaccatcacgggcaataaacgcttggcgaatacgacgcccctcttcatttcttactggaatattttgcagattaggatcacgagaagataaacgtcctgtcgcagtcaccgcctgatgatatgaagtatgcacccgcttagttttactattgaccatcaacggcaatttatccgtataagtcgattttaattttgccaatccacgatgttctaaaattaaacgaggtaactcatgactatgcgctaacgcttctaacacttcttcatttgttgaaggggcaccttttggcgttttcttgataataggaagattgagtttttcaaataaaatctcttgtaattgcttaggtgaagagagattaaattcttgccctgctaacgcgaatgtctctttttcaatctcagctaaacgttgagtgatttcttgggattgcatggcaagcacttgtgcgtcaatcaatacgcccttacgctccatgcgtgaaagcacagggactaatggcatctcaatatcgtgataaacgtgttttagcggtgcaatcgcctctatttgaggataaagcgcttgatgcagtaacaaggtaatatcagcatcttccgctgcatataaggtcgcttgttcaacctcaatctgattaaaggtaagttgccccttacctttaccagcaatctcttcaaatgtcgtcgttttatgatttaaatgcttttccgctaaggtatccatatcatggcggctactcacactatttaagacataagactccaacatggtatcaaaataaataccgtttaattcgatgccttcattttccataatgccgcggtcgaatttcaggttttgcccaatttttaagatggttttatcttctaaaatcggttttaaagcagttagtacctcatcaacaggtaattgctctggtgcatctagataatcatgacgcaatggaatataagcggccttgccaggctctaccgcaaatgacagaccgattaaacgtgcatcaatattattcaagctatctgtttcagtatcaaaagcaaaggcgggcgcttttttcagtacctcaacccagcgcattaagctttcatgagtcaatatagactcatagttctcttgagagataactgggaaattgtctgcagctggctgctctttgggtgttgcgacttctgcactataggggactggcgctttacggctactgcgttgagctaaccaaccaccattttgtaagtcacttatccagcgtttaaattcataacgcgtaaacatttcaagtaacttatctaaattaggttcattaaccactaagtcatcaaaggttttatcaagcgctacatctgttttaattgtcgctaattgataagaaagtttggcaactttctcatgttcaaccattttagcgccaagtgttttcgcacctcggaaactcaatgtggctattttatcaagctgttgataaatatcctctaagctaccaagtccttgcaatagccctaatgctgttttttcacctacgcccggaacaccgggaatattatctgatgagtcacccatcagggcgagaaagtcgataatcaactccggtggcaccccatatttttctttaacttcatcggggcctaaaataacattcgtcatcgtgttgataagtgtgatattgggcgtaactagctgtgccatatctttatcaccggtactgattaacacattacgaccatcactggctgcttttaatgccaatgtgccaatcacatcatcagcttcaacgccagtaatagaaagtaacggtaagcccatcgcttgaaccatttcatgcaaaggctcaatctgctcacgcagatcatctggcattggtgggcgattagatttatattcctcatacaactcatcacggaatgttttgcctttagcatcaaacacaaccgccacatgactaggcttatactgaattattaggctgcgtagcatgtttaacacaccatacatcgcccctgtgggttcacctttgctattagttagcggaggaaaagcatgataggcacgataaaggtatgaagagccatctacaaggataaaggggttttctgctatctggaccataatctgttcatcattgttctgaggttcattgatatgactagaatgccacattgcaacgcaatagacgaatattacctgagattattgacaaacttcttatcacgatagacagatataattatcggttagtcaccgacaatcattgattcgaataaatcaagcagatcaattttatcttaataaaaagacgataaatattattcgttttatacaaaataatgactaaaaataatatagaaacacctcaataatatatgattatttatattctctatattatttttaataaaatacggtaataaaatgcggtatagttaattaattaaataattgcagtaaggcaagcaatagtaccgaatagaataccgggagcattagcaatcgcaacgggatattctttacttttcacgccataataagtccataataaacagtttatggctgcaacaaaaggctggaatgggctagttttaatgccattaagattgtccattatttgtggaatataagagacatacataccacaggcagtgactgttgctatccaactgactaatgtgacaatattaatttcatttagcgtggcgagtttctgtttaattttcctcattaatttatttattgggttattcgctaatctaattccacgataaggaacaaggcttgttgaggtagattcatcgagtaaagtaagattttcaggatctgtttcgttttgcatcacgcctcctactgttatttatccaatatataagaatgaattttttatgttggataataaatataactattaccagttctagcataagtaaaagaatattgtcaaataagcaaaatgggagaataaagcagttaaattaaatgctaaataatcattattaacataaagtctacatttttcattattctaagaggttagctatttaacatttccaaacactaagcaattacacttagcagcggaaaataataaactaaaatataacaagttattgcttctttacctaaaaaaattagcgcaacacaaccataaacaaggaaccaaaagagtcagttcgttaatattgatttacagtaatattacagactatttccctgacattacattgtttgtgttattcatgaatatcctgtggataactctgtgagtatttttgtaaccctatctatattaagtgattaagtctattttcactttattaacataattaaaaaatcaatgacttacgatgcattactaattatattgaattaattagatatacatcaattaatgtggatagttatattatgaaggaaatatgaagaataaaaaaatggcactcacaaacagtgggtgccatttttatctaacattggtagctatttctacttatctatcaattagcaataacttatcaattattttttcatcagtaattgattgacgacatcagaataagcttttgcatactcttctggtgatttagcactaatgccatcatttttcattttatatttaccatcaataaccattgccggtacaccattaatttggaaatcagttaccgcattttgttgttggcttaccaatgagttaaccacaaaactattaattgctgcatcataatcttccgcttttacccctgcattaataaaggtagtgcgaatatcatcaacagagcgaatagattgtgtttcttgtattcctttaaataaggctggagagacttggtcttcaacacctaatgcaatagcaaccgcccatgcacgggtcatctctttacctaacggccctaagaagtcaacgtggtaacgagccattttggtgttttctggtacatttttttcaactgtgctattgaccttatacacttcagaaaactgatagcaatgaggacaataaaaagagaaaaattcaaccacttgtggagcacctgcaacaggcttagaaagatttgtatactgcttaccttcagaaatatcggcagctgaaacaccaaatgctaacaccatacttgctaacgccagccaaatttttttcatttcgtattatctcctaaaaattaatacattgggctaagttgtaaaggtggctcatttaattgctccacttgccctttaaataaagcgagttgtttaaaccaaaagtcttgctcttgaaaccaaacaaaggttcttggaaaagcaggatccttccagcgctttaatacccatgcgatataatgcaccattctcatcgcacgtagaggttcaattaatgatagttctctcacatcaaaatcttgatattcattataagactcaagcaatgtatctagctgtataagctgatcttgctttgagccacttaataacatccaaaaatcttgaattgcacttcccatacgagaatcatcaaaatcaaccataacgacttcatcacgccacaatatattgccgggatgacaatccccatgtagtcgtaattttttccatgttgagtctgataatttaggactcacttcatgaataattttatcaatagcatcaataaattgagattttaattgcgttggaactaaatcactttgttcaaattctaattttggcgcgaccaaatagtccgcaacagacagtgtcggccgatattgatagctcttttttctacctatttggtgaatacgtcctaatgtccgccccacctcttcaagctgaaatagattatcagtttcatatgctcttcccccaatacttgggaataatgcaaaataaaacccttcattagaaagatgaactgtttcgccttttacctcgataggcgctgcgacagaaacctgtgcctcttttagcgctaaaacaaattcatgttcttcttttatttgtgaatagctccaacgttgaggacgataaaatttcaccacataacgttgtttgtgctcatccataaactgaaaaacacgattttcgtagctgtttaattccgtcagccctgaatcaggataaaacccaatattaattagcgcatcccaaatactatcgggagacaatccttgaaaattaaatgaggcagatatggccatgtcctatcctgaaattaatctttaatcacaccgcgagcacgtaaaatagctgttttgaaatcttcttcataatctttcttcagcccaggaataacatctgtgggtgcggtattgcgcatttttagatgatagatcaaaatatcatcagttagatcagcaagttgacctttaaaacctgcttcatccgccagtttctgtaataattgaactaagtttaaatcagaatgctcttcccatactgggtgcaataattccatcacttcattaagacggtgacatttcatacaaaaaatccttattattaaaataacaacaaagtaccaagtattctctaagagaaaaagacaacctctgtcaatctgcgtaaatattacgcttttttaaaaaaattgctgttgctttacatgtaaccagaataagttcgtgctttctattactatatcgtctttacttgataagtattgttcgcaatttttcgcaaactcattcacaaatattgactatgaaaaaccagaatatcacaggcggtatactcgccggtggccaagctactagaatgggaggcgctgataaagggcttcaactcttacatgggctacctttatacctccatattgcccaaaaattatcaccacaggttgcctctattctgattagtgcaaaccgtaatctggaacgctatcgccaaagccagtatcctgttatcaccgatgaaaccagcgatttttccggtcctttagctggaatgctggcattattaaaacaagctcaaaccccttgggttgtgtttgttccttgtgatgtcccctattttcctagcaacttggttgaaacgctctatcgtcacaaaggggatgccttagccgtctatgccgacgatgggcagcgagagcacccaacactggcactgttaaatcgttgtcttattccaacacttgaggcttatctcgctcaaggtgaccgtaaattaatgctatttatgcgccaaatcgccgctaaaccggttttatttgctaatcaggccgcagcctttattaatttaaacacacctgaagatatagcaaacgccaatcacatagcaaaataggagctcataagatgacacaaaatcagttaccgctattagggatcaccgcttggagtggtacaggtaaaacaaccttactaaaaaaacttattcctttgttgcgtaacagaaatattcgggttggtatgataaaacatacccatcatgatatggatgtcgataaaccaggcaaagacagctatgaacttagaaaagccggagccgaacaaacattagtcgctagtcaacaacgttgggcattaatgaccgaaacccctgatttagctgagctggatttgtactatctcgcttctcgttttgatgcaagtaaactcgatatgattttagtggaaggtttcaaaacagaggctatccctaaaattgcactttaccgtcatatcaatgagcgaagtgttaatgagttactggatgaacatgtgattgcactagctagtgatagtgatttagacacatccctcccactgctagatattaattcgccagaagctattgctgattttattattcagtggctaacggaaaaaaaatagccataaaaaacgctaaagaaagttgcccttctctagcgttttataaaattggtttaccttaaaataaggtaaaatacagggggtctttatttagcaggacgaactgcaatcacttcaatttctacacgccatgctggattagccaacttagccacttggaatgctgaacgtgctggtaattgattggtttttgaagcgtcatagaacttagaataaccgttcataaagcctttaaaatccatagtgccgttattctcttcaccaccaactaagaatacttgcatcttaaccacgtctttcatatcaagaccaaggttattcaggttagttttgatttgttctaaaacattaatagtttgttcttcggtattaccgtaagaagctaattcaccttctggtgcatctgcggatttcttagtaggcactttaccacttaagaaaaccagattattacctgcattaatttcaactgcttctgaaataggcataccgtctaatttatgatgcacaacattctccgctgcatttgcacttgctacaccgaacacgaaaggtaaagcaacaagtagacttttatagcgcatgaaaactccttaatgtgtttaattacagtaaaacaagggtttacttcttaaaacgatccaaactaaacggcgttggatcaataacaggtttcttgcccatgacaatatcagcggtcacttcacccgctgccgggccttctgtcataccccacactgttgccgtgttaatcactaagcctgggtattctttgacctcagaaatgataggtaattcatcaaatgttggactcacaacggcaccccaacgttcaacaacttctgatttttcaaatactgggaattctgttttcattctttggaaaacagcatctaagtgttgcgtattttgtgttgccgtggcaactcggaattgttcgaatggtgttttttcatctaaattccaagaggtcggcattttaaatgaattaaatagatcttcaccaatagagaattccaacggtaactctccgccacctaataagtgcataaatttaggccctagcaggaagctatctttgactattgaactcgtaaagatacgtggtgcaacggcataagtaccatccgcttgttcgcggaaatgaataccattaggtaaatgcacattaccacgtggtgcaccaggaacccctgagacacgttgttgtgatagatatacattgagcgttgggatatcaatacccatattgcccataaataaacgcgaccagatacccccagcgagtacaacttgagacgttttaatcgcccctttctcactcaccacatcagagattttaccacccgcagtttcaatacctcttactgcacagttggtataaattttcacaccgatttgtttggcataacgagcgagtgcaggtgtgcctgtttcaggatcaacagagcctgaatcttcttcaaatgcagcaacagtccatggcgtttgagcaccgactaagcgatttgatagctcttcacctttaatgatgcgagtatttaatggtgtatcaaaacctgccgcttctttagctgttttgatccacgcttgagctttatctaatgctttttcatctgccagcgcttctacacgaccttgagtacgataactggtatccgcaccaattttctcattcatgccacgccataatattttcccataatggtgtaatgggaagatttctggcgatgtttggtaactaataatttggctgtatgcacggcctgattgctcaccggcaatctgacccttttctaagatagtgacactcataccacgttcagcaaggttaatagcggtcatgatcccttgaataccggcaccaataatcactacatctgcttctttaggaagagccccttgcgtaccttcaacaaatgatgctcttgatttagcttccacaaatttgccgtcacggcgaaccattggaactaaagccgcaccacctgctaaaacgcccgcagcaccaacacctaaaagtagctttctccttgaaatgttcatcttttacctcagtaatagtcttactatttatattgttattagattattttttagaggctttataatatcatgttttattataatgttaatgaatataataatttgttaataatactaataagacataataccattagaaacattatggttacttataaaaaaaacctattgataataaagtggaacaaaagagtcgaaataagtattaacttgaattaaaaggaaaagtatgtcttagatggaggtattgataagaaagggtataaatattttattaacatttaacgactgatgttgtatttaaagcgaccatttatgcagataaaataaatagactcgatagcacgattagctaaaataaaaagcgaataccactatagtagtactcgctttttaattaaatgtgaaaaaattaacgcattgtcacaaattcttccgccgccgttgggtggatagcaacagtatcatcaaaatctttcttcgtggcacccatttttaatgccactgcaaaaccttgcaacatttcatccatgccaaaaccaataccgtggattccgacaattttttcttcagcacccacacagactaatttcatccgacaaggctgacgatggcgtgtcactgcactatacatggcagtaaaagaagatttatagactttcacttgctcagcgccatattgctcaatagcttgaggttccgttaaacccacagtaccaatagctgggtgactaaataccactgttggaatattggtataatctaaatgttcattaggtttattattaaataatcgctctgataaacgacgtccagcggctaccgcaacaggggttaattctaccgcacctgtgttatcacctacggcataaataccgggcacattggtattttggaatttatcaacctgaatataccctttttcatttagcttaacacccgtagccgctaaattgatattatctgtagcaggttcacgaccaatcgcccaaattaaagtatctaccgtctgctctaagccattttcaagttgtaacgttaagctaccgtcggcatttttaaccacagctttaggaactgcatgggtgtgtaatttaggcccttccgcttccattacttccaccagcgtatcgacgattagtggatcaaaactacgtaatggtgcatgtttacgcacaaataagtgtgtttcactccctaacgcatttaatacacccgctaattcaacagcaatatagccggcacccacaacagcaacacgttttggtaatgcgctaagttcgaagaaaccatcagagttaataccatattcagcccctggaatgtttggctgaataggacggcctcccgtggcgataagtatattatctgcggtaattttttcaccgtttacttcaatagtatgcgcatcaacaaaacgggcaaagccttggataacatcaactttattattacctaatacacgttcataagattggtggatacgatcaatataagcagtacggctactgattaatgtatcccaatcaaaacggtttactgtagtatcaaaaccataatcaggaccgtattgatgaattgcttcggcaatttgcgcagcatgccacatcacttttttcgggacacaaccgacattaacgcaagtgccacctagcgctttcgcttcaattaatgcacatttttggccatacatagccgctctattgattgatgcgatgccaccactaccgccaccgatggcgatataatcgtaatgtttgctcataattgatctaatccatttatctgtagaaaaataggtacctaacaggctaattctttcatgtaataaagtctattatgacaaattttattacttagcaggttaggttttcgcttttacagtaataggtaaaacagtaataaatgacttattctggtacaacccattcaactaatgtgtgtccagtaccttcaggaaccaaggttttatgtagccaaggcaagatagacgccatttgtgatgccaatttccaaggtgggttaataacaatcatacctgatgctgtcatacctagttgatcactatctggtttcactgccaactcaatttgcagaattttacgaataccggtggcctctagctcttttagcatccgtttaatttgttggcgatgcacaacaggataccaaattgcataggtcccggtggcgaaacgtttatagccttccacaatgcctttaacaaccgcactataatcttgtttaagttcataaggtggatcaattaaagcaaacccacgacgactggcgggagggagttttgattttaattgtccaaagccatcttcccgacacactctcacacgtttatcgcgggaaaattccgtacgtaataaagggaaatcggtaggatgtaattcggttagcattaacagatcttgctcacgcaataatttagcagccaataaaggagagccgggataataacgtaactcatcagatgtatttaacgaaccgaccgcctccaaataaggcaagataagctcaggcacctcttcttgttgccataagcgtgcaatgccttctaagtattctcccgtgcgagtcgcatgtgcattggtgagctgataacgtccagcgccagcatgagtatccaaataaagaaacggtttttctttctcttttaaagactcaataatcagggtttgaacaatatgttttaatacatcggcgtggttgccagcgtggaaactatgacgatagctcagcattctttatcttccgttagaaatgggcatagcaaagtaattaacttactctgaaaagagtgaataagctaagtgtatcagaaaaagctgaacttctttattgaaagaaaaagaaacattgtgtcttggcaggcagaggttatgataaatcaatatttaacttaagtcagataaaggaatagaatgaaaaaatatatttttactgcaattattcttagtttaacagctagttatgcatcagcagaaacagcggttaatggttgtgacatcaaaaaacagaatattcaacgacaaatcgactatgccaaaatgcatggtaatcaatatcgagtacaaggcttagagcgagcacttaataaagtagaacgttattgcactccagaaaaggttgttgaagatacccgcctagaattacgtgaaaaacaactggaagtgaaagagcgtgaattagaattaaaagaagcgcaacttaagggagagcgcgataaaattactaaaagagaagataaacttgcgcaagcaaaagctgagttgaaagcagctgaagaagagttagagctactcacaaaaaaataatgccccgtaaattcccattatgttaagccatataatgggaattattattcattcgaactacctgctaatcataggtttgcttagataaaaagcgcataactgttaaaaatatcatcatacttaagccaaagcagacaactctgctaccctaatagatagctaatgataataagcattaagttatgtaataggcataaccttatgctatttttcaataatcattatcataatagtactcaattcttaagaatggactgatttaattaaagaggatatatgtcagaagagacacagaaaaaggcatccaataaaaacactcaactgactcagcccattaagcatgggttagaaaaagggcttcatggtggaaaaaaagccattggtattggtataaaattcactaattttgttaccaacattccctttattgctcaccttattcgagcggcagagcgttttactgaccgaatgggaaaccagtttggtgcggctatcacttacttctcatttttatcattaattcctgtactaatgctctcttttgcttgtgcgggttttattttagcttcaaaccctgatttgttggccaaattaattacgggagttgccaatagtattgatgatccaactttagcctcaaccgttcaacaaagtattgatactgcggttcgtcaacgtacaaccgtaggtttaacagggttagccatcgccttgtattctggtgttaactgggtcgggaacttacgccaagccattttggctcagtctcgcccgatatgggaacgcaacaaagaggatcaagaaaaaatttactttcgttattttcgcgattttttagcccttatcggtttacttgttgcacttgttatcactattacactaacctccgttgctggctccgcacaaaaattgattgtgcatacattaggtttagatggtattgaatggctcacacctgcttggacaaccattggtttaactatctctattagtgccaattatctgttatttttgtggatattgtggatcttacctcgtcaccaacctaaacgtatctcattattaaaaggaacgcttatcgccgcaattggctttgagatcttaaagtcggtgatgacatggttattacctagattagccagttcaccttctggtgcagcttttggctctgtgattggtttaatggctttcttctacttttttgcacgactaacactcttttgtgccgcttggattgcaacagatggacctaatatgcgcaaagaaaaacacaagagtgaaacgcaatctatcacctaaaattgtaacctcacgagatagggttaattccctgcattaaccacctatcaataatgtaaaacgtaataaggaaaaataaatgccatacgttaatattaaaattacccgcgaaggtgcaacagcagaacaaaaagaacaattaattgctggggcaacacagcttttagtggatgtgttaggcaaaaatcctgcgacaactgtcgtcgttatcgatgaagttgatacagataactgggggataggtggtaaaacagtaaccgatttacgtgccagtgcaaaaaaataagctagcggtttaacatataacgataaaaaagctgaaaatagcgttaggctatttccagcttttatttattaagttaatgccgtactacttatctattttgtctgttgtgcatctgcctgcaccgaagctttttcaccagtagttaacgatgttttagccgtgtttgagctattcgctgtttctgggtgaacttgcttttcaaattgcacacgcaattcacccaagtttaccgttggcgtctcgctactttgcgttaatacaaaagtgatatcctcagatagaattctcgataactcttgatttaacatctctttcgttaaacccgctaaaaatgcttggcgtaaacgctgatattgctctggtggaatatcaataatattgctttgctgagacaataaacgctgattaattaagatagaagtacttgttttggcataacgcgcaaacaattgagtgagttgaatttgcttttcttgaagtaaatcttgatacaattcatcactgacaccttgattacgtaattcgccaagctcttcccccacccaagtggcaagtgcaggaatatttgccgttgctgtatcaacatttaacgagcaactggctcgttgatattgcactcgacaatcgatattcacttgcgtactttctttttctttacgctgttcgagactacgacctaagtgcacaaaaatcacttcacgcgctaaatcacttaaccaataacggctcagtgtgtcagaatctttcactggtgaccaatctagatcccaaataagagagatttggtcattttttcgcatgggttcttgcacatacaatgtttctggtttcatatcggcaagaacaggcacaggcacaggtgtcacgcgttttccttccagagaagaaaatgcctgattaatactttcggttaagatacgattatcaacattaccggcaatatataacgtcatcatatctggggtataccaacgctgttgataatctgataactcttttgtatttaccgaatgattaaccggtttacctggattatggccttttagatttgagccttctagacgtgaacgccagataggatcatcaatattagcgggaaaagtcaccaccggaagcggtgattgaatcgcatttcgaaccgcatcttctgtatattgtgccggttttgctatgcccgccaataatgcaaaggcatcttttaataattcaggctggttattaggcaagcttaagttataaaccgtaaagtcataagagacgatcatcggtggcaatggataatcaggatcgaatgcatttttccaaagattatcgcgtttttctggtgttaatccggtgttttctaacacattcagttttgacaccagagatgaaaaccctgtttcactgcgcttttctgataaagagcccgtattcactaataagcgaatttggatcctatcatttgggcgttgtggtgtttgtaaaatttgccattggaaaccatttgcgagtcgcccttcttgccaagcaggatcaggctgcagtgcttcagcttgaacctgacaaatagcagcgctgaacataacgcttcccaataaaattcgtgtcattgcaccctgcatgtgaacctctgttttattaatccttggtattaaaccacttatgaggtttaacaataaatgccggaagacatgttagatgtaaaatgtctgtatgttgcgttgtcatctttatcaccacagaacgctaaaataaaatcactcacgtgattagagtcatagtggtgtaagaaggttcagatatctgactctttttgatcagatttttgttgattatatcctttaatcagcaaaccaatctcatcatcacgatgagattctgaacacgacaacatcgaaacctgattacttttattaagagtcacagcaatgtggcgcaacggttttaccataatacgattaatacaccagctaattgcaatagtgaggataagacccattaataaataagtcgtcaacatcagtgcgacagtattactcgcaaaacgataaaaacggttagtatctgcctgtaaaataagatgactggtataggctttatcgtcagcggaggtaatacctaaaggctgtaaagggatagtcacttcaacagggatgccaaacagccaacgtgaaaattgagaaactgattttttcggtgcaaaatctaagttcatcacctgaacattttcgggttgtgtcacaatcgctttacccagtatcccggtcgtttttaaactaatgatcagttgtttggcatcatttaaatctgaacgcaatagcgcatcagctagcggttgttgtatactgactgccgcattaaatagctgattttgataatcttctcggcgttgatcaatcaaataaacaagctgaatactaataaaaatagcaatagtcaccaacgtgacacctgcaacagctgccatctgtttgattgttagtgaacgtttgagatgaggtttcatcagtgctatttccagtaaccatgcttgaacaacggtgattatactgtattttttcgattatgtatcacaatcaataaagaaaaaacacacgaaagcctgcatctctactcaggttaaaatcaataaaaagaattatctggctataaacacaaatagccagataatattcatcttttttagatgataattttattactcttttaattgttattattaaatatcatcatttaaattatttagttttatgtgggttaatatcgaaaataaccttgtcattctccgttatcttgctagcgaacttaaataagctatattcattaattaaagaagttttaaactgacctttaatattaatttcattatcagctatcaaatctatataacttttgcttaatccatcgtctgaaggcctttctttaaatttaacatctgttatatttatgttgtctccatgtgcaaaaatttgaccaaaaccaagcatagatagtttatttaaattaatatcattaagcttatttttatctaagctattattgtcgttaccatctcctatcgggatatttcgataacctaaaaatctgatactactatttctcagcgcaaatctacccgagtagttattatcttgatgggcattaaatgagacaccagaatttctgacataagaagttgttttatcaatatcaacattaatatttctcccattaaataaaacttcgctatttataatagctagtttacctttaaagttaatattgtcactttctatatattgaagtgctgatcctatttctttaccctcagcctccaactttcttttttctgcttgtttagcttcatcgattttaagaacagcactctggatcttgttatattctgcttgctgttgatcagcaactctcctagcttcagtagctagttctcttattttctttagtttatttttatgtataaaatgaggatctaactccattattttttcttctaatgcctctaattctaatgctatttcagctgatttttttgcatctatttcaagaaaatataacttcatagatgctaacatgaacattagatctacttcattatatgctctaaattcattttttttattaataattccgaatactgatttttcattagcattaatttctttattacgaatgatattgatttttttagtgattagatccccatcaagattaaaaatgccaccttgtagagagaaaagatctgtttttaatgaactattttctaaaatagagaggccttcttgattatctttagatagctcttttccttggtcacctttccaatcataatcaacaaaactaaccgtttcatagccattgatcacattaaaaactgggattttatttttacccaatatattaatacgattagaaaaaacattgattgtttgtttttcattgaaattattaacattctttagattaacataaccatctgataaataaatttttttgcctgtaatactatctaacttccctgaaattaacattaccttatctgaacctgaaaattgacacccgtagcaatcaattccatttggattggcgataatcaattctgcattttgtcctaaaacagagattttaccctctaatgaactcgttttttttgaagttacttcgttaagaataacttttgcttttacttcgctattatcaatatgaacgccttcttttccaacattaaattgttcaaaatagttaactgataaattcatatcgtttgctttgttgatagaaatagtttctgaaccatctccattcttgctcactgttgtgtttgcagattttcctgcatctacaataacgttattggctactgcactattatgcataaaagcaaatgaaatagagataactagaagatttaatgatggcaattttttataaaacataacgtcccttttatttagtaaatttaaagggagactaaataataagaaacgctagtcatataaaaataagaacaacatataatatcattgttcttattttataaaccaaatttatcaatctattgattaaaactcgccgtgatcttgctctacggcaaaacaagcaatcaactgcccatgatactcttttaaagtcggttgtaattgtgtacacattccaaatgcgcgccgacaacgagcagcaaaagcacatcctggtggtggatttaacggactaggtaattcacccgttaatttaattctctctcgccttaatgtcggtgttaatcttggtgttgctgataataacgcttgggtgtaaggatgttgtgggttttcaaatatctgtgttttagtgcccttttcaacacagcgccctaaatacatcaccaccacttcatctgcaatatgttcaacaacggaaagatcatgggaaataaaaacataagaaagtcccatctcttgctggagatccatcattaaattaagcacctgagctcgcacagaaacgtctagggcagatacaggctcatcagcaaccacaatatcaggttcaagcattaaaccacgggcgatagcaatacgttggcgttgtcctcctgaaaacatatgcgggtaacgactatagtgctcagcctttaaacctactttcgccatcatagaaagtactttttctttacgatcttgtgcacttaacgtggtattaattaatagaggctcttctaatatttgccccactttcttacgtggatttaatgatccataaggattttgaaagacaatttggatcttttggcgccgtaatttttccgcagatttatctttaactaataaattttgcccttgatatgaaagctctcctgaggttggtacttcaatcatcgttaataatcgacctaaagtagacttaccacagccagactctccaaccacggctaacgtttttcctcgctcgagctcaaaagagacgccatctagtgccttaacggttttttccttcgtaaaaagtccacctttaacgctgtaatatttggcaagattaaccgcttttaataaaggcactgcagtattcggattaacattagccatatgttggtctccctgtatcatccaatggtgtatgacatttcactcgatgtttacctatctctttcaattcgggctctatctgaaaacaagtatcctgtgcataggggcaacgaggattaagtaagcaccccatcggtctatcataacgtcccggaaccacgcccggtaatgactcaagccgagctttatcactcgcaaattcaggtaatgcttttaataaagcttgcgtataaggatggcgaggcgctttgaaaatttctgttgcgaggcctgattcaacaacttgccctgcatacatcacaataatggtatctgcagcttctgcgactaatgccaaatcatgagtaattaacactaacgccatattttcttgtttttgtaattcaagtaatagctcgataatttgcgcttgaatggtgacatcaagagcagtagttggctcatcagcaatcaataatttaggttggcaagcaattgccatcgcaatcatcacccgttggctcattccacccgacagttgatgaggataaacatttaaacgtgatgcgggatcaggaatacccaccagcgttaatagatcaatcgcccgctgtttacgcgtacgatgacttcctccttgatgaactttgagggcctccataatttgataaccgaccgtaaaacaagggttaaggcttgtcatcggatcttgaaatatcatggcaacctcagcaccaaccaaatcacgacgttcagattcagaaatttgcatcagatcacgtccatcaaattgcaaggcttctgctgatactcgaccgggaaaatcaataagccccataatcgctaatgaactaactgatttccctgagccagactcgccaacaatgcccaccacttgaccttcttctacttgataactgatccggtctaccgctttaaacggagtatcttcatcaccaaagtgaactgataattgatttatatttaataacgccatgctcttactccgttactgctttaattttggatcgagtgcatctcgtagaccgtcacccattaagttaaaggctaaaaccgtcaacaaaatagctaaccccggaaaagtcactacccaccatgcactttgggtaaattgcagtacatcagataacatggttccccattctggtgtcggtggctgtgcgcccattcccaaaaaacctaaggcagccatatctaagatggcattagaaaaacctaaagaggcttgcacaattaaaggagcaaggcagttaggcaagatattgataaacatttggcgtatagagcctgctcccgcaacacgagacgccacaacataatcacggttaatttctgttaacactgccgcacgcgtcagtcgaacataatgaggtagggcaacaaaggttaaagcgattgaagcattaataatcgaaggcccaaaaatagccactaacactaatgctaataaaagactgggtaatgccagcataatatcgactacgcgcataatggcgatatcaacgatgccaccaaaatagccggccattaaacctaaaataatgcctaaaatcagtgaaagtataacgacaatgcaaccaacgagtaatgaaagacgcgcaccatacattaagcgagagagaatatcccgcccaacatcatcagtacctaaaataaaactccagcttcctccttcttgccatacagggggcgttagaagaaactcacgaaactgctcattaggtgcatgaggcgctaaaacgcctgcaagggcagctatcaacagcataatgacaatataaattaagccaacaaccgcccctttattttgtttgaaatagtgccaaaactcttgaaagggggtcattggcaccggtgcactaatgaccggtgttacgttattttcagccatgatgcactccttatttcttatgacggatacgtgggttaacaatgccatatagcacatccactaatagattcacgaaaatgatcatagtggcaatgagcaatactcccccttgaacaacagggtagtctcgacgttgtagagcatcaattaaccagcgacctaaacccggccatgaaaaaatagtttctgtcagtatcgctccggctagcatcgtaccaacttgtaaaccaatcaccgtcacaacaggtaacattgcgttacgtaatgcatggatcaaaatcactcgtgcacgacttaatccttttgctctggcagtgcgaatataatcttctcccaatacttccaacattgccgaacgcgtcatgcgcacaataaccgctaatggaatagtcccaagcacaatggccggtaaaataatatggtgtagcgcatcaagaaaatcaccttcttccccccaaaagagcgtatcaatcaacataaatcccgttagtggatagctatcatctagaaagacactatccgccaatcggcctgatacaggtgttagatcaagcttcactgaaacgagcataatcagcatgatcccccaccagaagataggcatagaatatcctgcaagtgacacactgattgccgtatgatcaaaaatagaacctcgttttactgccgcaagcaccccaacgggaatgcccactgaaacagcaaaaatcatggcacaaatacctagctctaaggttgctttaaatcgtggcaaaaattcatcccagacaggaatacgactttttagtgaaatacctaaatcaccgtgcataatgccgttaaggtaatttaaatattgttgccatagcggtttatctagtcctaattccgccattaaataagcgtgacgctctggtgataatccacgctctcccgccataatcatgaccggatcacccggaataagatggacaaaaataaaggttaataacgtaattccgataaacgttgggatcacgagccccaaacgctgaaggataaattgcagcatatcctaattctctttttacacatcagctaaaagatagcgctgataaatcaggggaaagcccctgcgctcacagtgtactgaatgtattgattattattggatagcggtacttctctaaacgctcagagaagtaccgtggtaaagataactcagctcgttaatatcacgactattttagagagacattattaaagtggtgtttacctaatgggtcgaccacatagttctctacttttttactgattggttcatataccgtggagtgagcaataatcaatgctggcgcttggtcatgcatcaccacttgagcttgcttatataactcaacacgcttatcgtgatctgccgtgatccgcgcaggctggatcagatcttcaaacggcttataacaccatttcgagtagttagagccttgctctttcgcagcgcaactaaacagtgtggcaaaaaagttatcaggatcaccgttatctcccgtccagcccatcattactgcttggtgttcacctgatttagcacgtttcagatattcaccccactcataactaacgatcttggttttcacaccaattttttcccagtcagcttgtaccatttcagccatacggcgggcattagggttatatggtcgttgcactggcatcgcccataaatcgatagtaaagccatctgcaaggccggcttcttttaacagtgctttggctttttccgggttatattcataatcgacgatgtcatcgttataaccccacattgtcggtggaataagattcttcgctttctggcctgcgccttgatagacagcttcaataatggcgtctttattcaccgccatacttaatgcttggcgtactttttggttatcgagcggttttttctccacattaaaagagatataccccacgtttaatccgggttgttccagtagctggatatctttattttgtttcatcttggcgatatcagcaggatttgggtaaggcattgcctgacattcgttcttttgtaatttggcataacgaactgaggcatctggcgtaatagagaaaactaaacgatctatatcaggttttttcccccaatatttatcatttgctttataaagaatacgtgagtctttttgatattgttgcagttggaaaggtcccgtaccaataggattgagatccactttctcaggagtccctgctttcatcatattatctgcatactcggcagaaagaatagatgcgaagtccattgccatatcagccaagaaaggcgcttctgaacgggtaagtacaaagcgaaccgtattgtcatccactttttcgatcttctcgatcatattattcatatccatcccagtgaaatattcataacttccaccagagactttatgataaggatgatttggatccatttgacgcataaatgtatatatcacatcatctgcgttaaattcacgagtgggcttaaactctttgttgctatgccaactaacccctttacgtaaatggaaagtatacaccttaccatcatcgctcacttcccaactttcagctaagccgggagtaatttcagtggtgccgagtttaaactcaactaagcgatcataaagcggtactgagcttgcgtcataagtcgtacctgaggtaaatagttgggggttaaatccttccggtgagccttctgaacagtacactaatgttttcgcttgcacacccgctgaaatagccaaagcgagtaagccgattgtagcggttagcaaccctgtctgttttttggagcttctcatcattattctccgtcattattctgttgtgttttttggtttcctgtttaaaaacggaatacctttttattttgtcattgttcaattaaccaactgtattcgtttccgtcaataaggggctttacgccaaaatgaacaagttgcaaacataaacgaaacaaataccaaacaattacaggataaaaattggacaaattgatttaatggtagagaattaaaccacacattaagtaagtcttaagttaaatgactatttaaaaaaaaacgatattttgtgattgaacgcttaaatattaaacgaatatattgaaatgaaacaaagaagtgggtggtttattctgttagtagcgaagaataacaccagtatatagaagataatcagcgcaatactccgttaatccaaagagagaaaaatacctttttctctctttgactactagtatgctatataagccaataatctatagttatttattaaataatttataaaaacagtagtaaaaaatataaaataaatcaccataatcagaagttaaattgggtattaaaattaaactgcgatcctgttgcttctcgactagaaggggctgataacggtatgctccatactaactgataacttagtttcttaaagctaccttctaatcctattgccgcaccaactaaatatttatttttattataaaaaattttttttctatcttctgaaacggaaccataatctatggcggaaaatagcatttggttattcaagggtgtaagccaagtaactttatgtcgggaaacaaactgattggcatcagaataacctttgccggactcaaaaccatacacgctatacagaccaccaatggttgctttatcaagtaatccatcaatatctgagcgagtcagttgaaatatcatttctggttgataaaaaaattgctgtgaagtgattttaaaaggaattaatgcatcaaaattaagattaaaaatgggtacaccattaagggaatctatcggtgatagtcttgcgccaggaataaaaacactctgcttataatgaagtttagcattaaggtaaccccctctcataaagcgataattttgctcaatacccgcattaacataaggactgcgacgctcatggactgataagcgatagcctgacacttcattgcgataagtgtaatattgtattccaccacttaaagtcaccgtacgctgtgttgaaggtctaaattggcgctggatctcaaaagaaagaagctgttgacgcgttttttgtaactcttttgtcacttcagagactctcatttttgaaccaatatcataaccaaataatgtcgcacgccaataatgataaggtacttgccataaaaagatctgctttttgatgcctcttgattttaaggtatcgagttgacttgaaagaataaccattaaagtatcattaagttgcgctagattaccaaagcttagccttgtagtaccaaatagatctccgtaaattttctgctccttattatcaatcgataccgagcctgccattgtcctttttcccacttgagaaagagaaataattgactcatgttcttttgacgagggttctatctgaattttgacattactattaggacgggatctgaaattgtcagccccctgttcaatatctttaacgtttaaaatatcaccttttttgacaggcactgcctgtgaaatcaaatagcgtttatctgtcggggcttcggaaacaatgtcttgcactctcccgacatttaatgtgatatccaatacctcgtcatcggcataaagatcaactttacccacctcactggtcacataacctgcatcataaagcagcgcattcagaatattgatatcttgttctaacaatgcctgtgactgacaatgcccaactaattcagcttgccattttgccacttggcgttgcagtgatgaggaagaaaactcatcgagatgatggagttttacctgtttgattgaaaaacaatgtacagaaggtgtgataaattcccttttattttgtggtgctaagttcactaaagagacattgtcattttgttgtagtaattgatctctaagttgtgtttctgtcggtaaatctactggtacagggggatcgatatgactttcattcgctacagaaaaaaaagcacaacaccataaaatacaatagattaaaatagacaactcaatacgcattcaatttacactcttatcaccggaaataggagtgctatgtatatgtaaagagaaataaaaaagatttataaaaaccgtctttttactctgacttacctacacagttaccaataatgcaactatgtcgacttatcagatcagagagtaaaaaatcataagcgattatttataaagagatgccttaaaacgacaaaaccccgctttaaaaaagcggggtttctaaatatggtcggcgagagaggattcgaacctccgacccactggtcccaaaccagttgcgctaccaggctgcgctactcgccgaaaacgaggtgcatcttactgcctgaaagccaaagcgtcaatacttttttcttatctcccaactgttcgtatggttttcaaccaaaacgactgatttttaactttttattagcactattgctgaaattaaccgcatcataaaccctacttttacttaagttatatgaaacagctatttttctttacagttatcagaaaacatcatgaaaaatgacaaatttattctttattgttatcgtttatttcatgcactttttatataattaccctatgtcaaatcagttaggtgaatttagagcatgaaatcacgttggggcattagcacattacttttattcgtcaccacattttcagtccaagcgactacatcacaaacttgtcgggtttactttaaagaagccgataaattcttacaatatattgctacaagagatgacttaaaacagaacatgcctgaaataaaaggtaattttgaacaaaataaaaagttgatcagttcttccaccctaaaagagcaaaaagcaatttgtgaaaaaggaatgcaagagcttgataaccttaacaagatgtttggtccaaaagaagctacagcaaaaaaataaatataaataatgactaaataataaataagtgattatatttagtcttatttataataattaggttttatttccagtattaagtgtatcattagtgctacctaatttttttatcctttctttaggtgaattatcactgttgtcatcatgttgtgtataataatcataaggaagcaataaagtatctaataacgcactaaaaggaagatcaagaataactaacggtttcattgcccaccctgtttcatcatcagaaagcatattaacgttattttttgttcctgaataaagctcgttattagggcctgcatgcgtcataacacttgagcaccctgtcagtgatagcataaacgtcgctagtattaacttgttaatgattatggatctcatagagcacctataaaaagccgttagggttaaacacctttattacatagttaaacctgttttccttgttaggacaagaaaaagaacatctaaggggtttatttttaataacacaggtaattaatttaatctaaaaataaactcattttatataataattctgatgttataaattattatgtttcactgatattaaaattcaaccctattcattttaaataaatattttaactgaatatttatcttttttatttttttgatcgttatatatgctgaatttgtgcaataagacacagcgtttttttatctttttggcaaactagatgtatcgttttagctagtgagttacttggctatttcacttggcataggatctgttttatgagtgatattgcattaacaatggtgatgttgtcattagcaggcgccttaggactttggataggtaacgttaaaatctatcgggtcagtttaggaattggcggagtgctgtttggagggattattgtcggccatttagctcaacgttatggactggtgctcaacacacagatactccattttattcaagaattcggccttatcctctttgtatataccattggtatccaagtcggccccggttttttctcttctttacgtgtatctgggcttaagctcaatgcctttgccattttgattattttacttggttcactagtaacagcctttatttatcacttatttaatgtgccactccccattattcttggcattttttctggtgcggtaacgaacacgccttcattaggtgcagggcaacaaatcctcaccgaccttaatattgatccagccataatcagtcaaatgggaatgggatatgctatggcttaccccatgggaatttgtggcattcttttggtcatgtggtttattcgcgtgctatttaaaatcaatatagagcgagaagcaaaacactttaaccatcagcaaaacagcactaaagagacactgcataccattaacattgccattcgcaatcccaatttagatggcttattaatgcaagatatcccactactcaatgaagatgcccttgtctgttcacgtttgaaacgtggcgacgatattatggttccgatgccttccactattattcagttaggcgatttactgcatattgtcggctcaagagaagatctcaataaggttcgccttattttaggcgaagaagtagatgcttcactttctacctcaacccatcaattacaatctgtgcgcattgttgtcacgaatgacgcagtattgagtaaacgattaaaagatctcgatttaaaaagaaaatatgatgttgttatcacacgattaaatcgagctggaattgaattaattcctagtaataacagtatgctacagtttggcgatattttaaatgttgtgggtagacctggggccatagaagcaattacggtacttttaggtaatgcacgacaaaaattagaacaagtacagatgttgcctgtttttattggcattggtttaggggttttattaggctctatccctatttttattccggggatccctgttgcactaaaattaggtcttgctggcgggccactgatcgtggccttgattttaggccgtattggtactttcgggaaactctattggtttatgcccccaagtgctaatcttgcactacgtgaactcgggatcgtcatgtttttggctgtggttggccttaattccggtggcgggtttattgataccttaatatatggacaagggttaagttggattggctatggtatcgcgatcacactactcccattattgatagtcggtataatggctcgtctcgtttttaagttaaattaccttaccctatgtggcgtacttgcaggctcgatgactgatcctcccgctctagcattcgctaattctattcatcaaaatagcggtgcagccgcactttcttatgccacggtttatcctttagctatgtttttacgtatcatcacgccacaactaatggcactgattatttgggctttgtagcgaatttaatagatatattaaatggttgcagtcaatttgttatcaaatgcttaatttcactttacagaaggataataaagggcttaaaaggggcttatttaagccatcgattttattattatctgttttaatagcgctcgtgctaagaaatttagattgagacggattgctaacttttagtaatcaatttctttccgtcaaacttatgctcaaaagtcctcgttattgtctttgccccttcttctcgctgaaggggcatttttattacttatttattctggcgataagcatcgttctatctcttccgataggatctttattcctttttcaattaatgcaggctctggtacataattcattcgcatacattgatgtgcatgttgccacgactcttctaagcctggaaagaaatagtgaccaggaaccatcaatacaccacgtttttttaaacgccgatagagttcttcacttgagattggtaaatctttaaaccaaagccacaagaaaatagccccttccggtttatggataaggcaacgctctttaggtagatagcgacgaataatatcaatagtttcaagtactcgttgatgataaaaagatctaattatctcttgggataatcgcattaaatcatcacgtttgagcatttctaatgccatcgcagggccaatacctccaggggcaagactaataatgccattcacattcgtgattgcagtaataagctcttcattagcgataataatgccacaacgagcccccggtaatcctagcttagagaggctcatacaaagaatggtgttgtcattccagtggggagttgcttgggaaaaaataatccccggaaagggcacgccgtaagcattatcaataatcagtgggatatcatgttttttcgctaaggcatccagcttttttacttcatcatcagtgatcacattacctgttggatttgttggtctagaaacacaaatagcactaatatcatcacctatcgttaaatgttcaaaatctacatgatatttaaattgtccatcaggtagcatttcaatagtgggtttattcgcaacaaacaaatcttcttctaatccggcatcggcatatccaatatattccggagcgatgggaaaaagaattttgcgctttttaccctcagcagattggccaccgagtaaattaaaaagataaaagaaagcactttgactgccgttagtaagcgcaatatttttagcggaaatattccatcctaatttttcttttaaacaaatagccaaggcgttgagcatcgcatctttaccttgtggcccatcgtaattacatacggcatcacttaatgagccattattcaccatctcttgtaataattggtgaaaatagctgtccatctcaggaatatgggcaggatttcctcctcctaacatcaccgcttctggtgtacgtattccttcatttaagtcttgcatcaagcgagaaatacctgagtggcgagcaaatttttgcccaaatcgtgatagttgagtcatctttgcaggatcttctttgtcgtttttcattagataaacaccataccgtgagccggactcagcatcaaccgttaacagatgtatacttaaatatcaacaccaaccttaaaaccaatattgaaatataaattcagttttaaatccaattaaagataactaaactagtattcttctatttaatactactttccagctgagattgccgacaaaaacaacagagtatatgatcgttaaccatgcctactgcttgcataaatgcataacaggtggtagtaccaacaaatttaaacccttttttctttaacgccttagccatatcatctgaaatttcagtaaaagcaggaacctgtgaaatagtctgccactggttatcaatgggttttccatcaacaaattgccaaataaattcactgaaatcttcaccctgagcttccatcgctaaaaaggcacgcgcattattgataatggcgttaattttgccacgatgacgaataatagacggatcttgtagtagtgtttccacatctttttcagtcattagtgctattttttcaggacgaaaatcaaaaaagcaacgacgaaatcccgctcttttctttaatacggtataccacgacaaacctgcctgttgtccttcaaggcagatcatctcaaaaagtttgtatttatctcgctgtggttttccccattcattatcatggtatgcgagatattcaggatcttgagttacccaatcacaacgttgtttattcatttgctacattccttgttctttataggtgttattcatacaattgatatcgctctttatatactgtataaaaacacatgtaaatagactaagaaaaaatcattctggctatttgagcatagtcataacaacgattaaggcactatttttttgatcaagagaaaattgcccgtattccttgctgtatatctttcgtctagaaggtatactgaaacctttctttttattctatgtatcgccatgcggatataacatgcaaaagtttgataccaaaacctttcaggggctgatcctgacattacaggattattgggctcgtcagggctgtaccattgttcaaccattagatatggaagtaggagcaggtacctcacacccaatgacctgtttacgagcattaggtccagagcctattgcagcggcttatgttcaaccatcacgccgtccaactgacggacgttacggtgaaaaccctaaccgtctacagcactattaccaattccaagttatcatcaagccatcaccggataacatccaagagctttatcttggctctttaagagaattaggattagatcctactatccatgatattcgttttgttgaagataactgggaaaacccaacattaggtgcttggggattaggctgggaagtttggctcaacggcatggaagtgacgcaatttacctatttccaacaagttggcggattagagtgtaaacccgtcactggcgaaattacttacggtttagagcgtctggcaatgtacattcaaggcgttgatagcgtttatgacttagtttggtgtgatggcccactaggtaaaaccacctacggcgatatttatcaccaaaatgaagtggaacaatcaacttataactttgaatatgcagatgttgacttcttattctcttgtttcgaacaatatgaaaaagaagctcgtgagttgttagagttagaaaaacctctgcctttacctgcttacgaacgtatcttaaaagcaggtcacacttttaacttattggatgcacgtaaagcgatttctgttacagagcgtcaacgctatattttacgtatccgtactttaaccaaagccgtcgctgaagcttattatgcttcccgtgaggcgcttggtttccctatgtgtaaaaagtaagaggctattatgacaactgagactttccttgtggaaatcggcacagaagagttaccgccgaaagcgcttcgttctttagccgaatcttttgcgacccattttacggctgaactggataacgccaatattactcatggtgatgtatcttggtttgccgctcctcgtcgtttagccatcaaagtggcgaatatggcgaaatctcaagcagataggatcgttgaaaaacgaggccctgctatagcgcaagcatttgatgctgaaggtaagccaactaaagccgcagaaggttgggctagaggtaacggcatcactgttgaccaagcggaacgtttatcaacggataaaggtgaatggctcttttatcgtgctgaagttaaaggcgaagccgttaaccaactactggctggtatggtaagcaatgcactggcaaaactgcctatccctaaattaatgcgttggggtgataaagaaacgcattttgtgcgtccagtgcatactgttactttattattgggtgataccctcattgacggtgaaatcttaggtgtacaaagcgctcgtattattcgtggccaccgttttatgggtgaagctgaatttactatcgataatgcagaccagtaccctgaaatcctttatgaacgtggtaaggtcattgccgattacgaaaaccgtaaatccatcattcttcatgatgcacgtcttgcggctgaaaaactaggtggtgtcgctgatttaagtgacagcctagttgaagaagtcacttcattagttgaatggcctgtggtgttaacggcaaaatttgaggaaaaattccttgaagttccggctgaagcattggtttacaccatgaaaggcgatcagaaatattttcctgtttacgataaacaaggtgcgctattacctcactttattttcgtttctaacattgaatcctctgatcctcaacagataatcagtggtaacgaaaaagtggttcgccctcgtttagcggatgcggaattcttctttaaaactgaccgaaaacagcgtttagaagataacttaccacgccttgaaactgttcttttccaaaaaaatttaggctctctacgcgacaaaacagaccgtattcaagctctcgccggttttattgctgagaaaatgggtgctgatgtcaataaagcaacacgtgctggtttattatcaaaatgtgacttaatgaccaatatggtgtttgaattcaccgatacccaaggggttatggggatgcattatgctcgccatgatggtgaagatgaagaagttgctgtcgcattaaaagagcaatatcaaccacgttttgcaggtgatgcactaccatctaatccagtagcaagtgctgtcgctatagcagaaaaaatggatacgctggcaggtatctttggtattggtcaacatcctaaaggggataaagatcctttcgctttacgtcgtgctgcccttggtgtgctacgtattattgttgaacaagatttaccattagatattgaagaattaacccaagaagcggctcgcttatatggtgacaaactgacgaaccaaaatgtcgtcagtgatgtcgtagagtttatgctaggtcgtttccgtgcttggtatcaagagctgggttatagtattgatactattcaagcggtattagcgcgccgcccaacacaacctgctgactttaacgctcgtgtaaaagccgttacttacttccgaaccttagaagaagcagctgcattagccgaagccaataaacgtgtttctaatatcttagcaaaatcagcagatgttaagctcaacgataaagtattagcctcggtgctaaaagcgcctgaagaagttcagctagcggctaatctttctgtgctacaagataagctagcccctctatttgctgaacgtaaataccaagaagcattagttgaactcgcctctttacgtgatgttgtgaataacttctttgataaagtgatggtaatggataaagacgaagaaattcgtgtcaaccgtttaaccatgctacatgaattacgcgagttgttcttaaaagtcgctgatatttctgttttacaataagttataaaacttagtcatacaacaacataaaaccggcattgcgaaagcagtgctggtttttttacttaaaataaaaataaaaaacgattaaaaaatacccatttacattctatgattgagtgataaaatttactatagtaaaaactaccacagaggacgtgatggttatttataaaacaaagatgttcaaaaatagtttcaaaaaaataacgcttacgaatgcagaactaatagctatcgctaccgaagtccttgcaggacaatttgaggcagatctaggtggtggtgttatcaagaaacgtgcctgtatccaaggaaaaggtaaaagtagcggaattagaacaattatattttataagcaagggaataatttattctttgctgatggttggaaaaaatcgagtttaagctctaaaaaaaccaaagagatcacagatgatgaacttgagtcctataaagatctagcaaaagatctcttcaatgcaaatcaaaataaaatagataaaatgattgcactaggccttttaacagaggttaaatatgactgataaaatgaaagaaatgctaaaatttgcacaagaaatggaagatgcaggagtcactgatggcagtacaactaaacgtattgccgccagaataaaagcgaaagaattacaagctaagtataaacatcctacccctatgacaggtgaagatataaaaaggatccgtgagcaaaataatatctctcaatcttcccttgctttgatattgaatatgactaaagaaagcgtttctaagtgggaaagaaacgaaattaagcccaatggtgcagcactacgacttctgcatttaatagataaaaaaatattattcatctagtttcctcaaaagaataaaaaccgacattgcgaaagcagtgccggttttttattggtgattaatcaatttattataaatagtatgatgagtaagctcgatgatcctgatagactcattatcaataatattaacaataatatgtaataaattttcaatatcttctgcgtgaaaagattctatttccgtttctatctcaataggaaagccatttattttactaaagctataaccaaatagtataaaaccaccctctttacttaaatcagcattattaatataaacaaggcgctcactatttataaaatgaatattacttttattattatcttcaaatgataccttaactttattattggtgatcacttctagctttttgaccactgcactgattttatcttctatcttacttcgtagatcaataataaaagatgctctattgagtgaagcttttattttttcgaatatcttatgttcatcattcatggaagatcctacaaaatatggggtaatgatcaaatttcttaaaaaagatatcatcaaggcagtgattatcatcatttaggacgcgataaaaatcaagctgttcaagatctaatttaaaacaatcttcttttccatataaaaatgatgaagaaaaaatcatttgatcaaacacataccaacgattaatagatgcggaattataataatatgtacctaaattattagtcttcttatcagataagagataccaaaatgggttaaataatagttttcttttcttttttattaaatgataatctcttgtcgcatacaatatattaagcatcgcattagaataaggctctgtattataatcccccatacaaataaactgaacatcatctccattattttcaaagagtttattaatactacttcttaatcctgcagctgccacttctcgagttgtatcattagcacttaatattgatggccaatgtgataaaaaaagggtgattattttttgatgttcgatttctttaaatacaacagcaacgcctacccttaccattctattatcaggctggagtttagttaaaaacttacttgaaataaactctagtttattcatttgatatattaatgatatatcaataataatccggcctatttttcctgagagatcgatataccccatttttaattgagttgccaactgcttaaaagcgtagctctcgttttcagaaacctcactcaacgcaatgatatcaagtgtttttttaatgataagttcttcaagatattttttcgctaagccaactttttcagtcttgacgttctgttttgattttgtcggtggagatattcctatattccaccagcataaatttaattccattgttatattttatatccattaaaatatatttaatttttaatctctaataactattattaaaacaataagttaactttaacatgacaattagctttataaaaaccaataaaatgaatcaagacaaataaatattttaatttttatttaaataatatgtatattaataataatagaaaaggtaacatcaaaatcagttacctttcacaataaaaaacgttataacccactttctaccgtaaatatttgccgataaccatcaatatcacgcataaaagcaatatactgatcattaggtgaaaatacgactgcgtcaccacttggtgcttgtgctgttttatcagttaatcgcgttaattcacctgttttagcattacataacatcacgctattatcacaaataaaggtgagatattctccgctatagctccaagtgaatgcagattgaatatcccattgctgtgaagtgacctgtctaatcgctttggtggctggcgaaacggtatatagctggacaacaccattatcatctttcatcagaaaagcaatcgcatctccttgcggtgaacttcttaaccaatgacgaggttgatttaaaacaccgggatattttctatggtgggtattcgtcaagcggatttgttcaatcccttgtgcaggagctggcatcgtcgtctctgttcctgccagaggtttatcaccttctagactgaaagcatgatcatcatctggcaaatcaactaagaagatatcagcgaccttctcaccactttcactgaccgtatcaccaataaaagcaatagcccaacgctgttgtgagccatcagctttggtataaccttgtttacctatccaacactcttcataggctttattaatttcatcactgcccttttgtggataagcgactgtttggcttattagggtacagaaatattcaccgtcatactcacgggggtgctttttcgcaactttaacggctttgagtggcactgcgattgcaacattacgttgatcgaactcgcgccctaactcatgcattatgtgatcattataagtaaagcttaaacgtgtaccatcagggctaaacacatgcacatgggttccaccacgtaacgcgccagcttgataaggcaatgtcagggaacaagcatcgatattaactgcaccaagatcttcctgctcattaacaatcacaccgcgacggtgatgaaaatcataatgccataaatcatcgggattttctgggccatgaataaaagcataacgcaccggtgccacagggctgactgtggcaaccccaacatgagcaccttgagtggcggtgtaaattatctgttgctgttttgttttcgcatgaattttttctatggttaatcctgtaaaagatccaccattgggacgtacatcataaactaaccactggctatctggtgtccaaacatttatattggttaactgatgatgacgactatcaaatgtaatctgttgttcctgaaaagacatagttatccttatcgggaaataaatttccacattataaaaactaattgattttacctggcactaaaaaaactcagtcgagactttttcgcaaggtgattactctaccctcactaaacagtcaaaaaattaaaaaatcatgttacttagtgttctttatattattggtattaccgcagaagccatgacaggggcacttgccgctggtcgccgtaaaatggatgtttttggcgttatcatcattgcatcagccactgctattggtggtggttcagtaagagatattcttcttggtcactaccctttaggttgggtcaaacaccctgagtatattgtcacagtagcttgtgcagcggtgatcactatttgggtcgcccccatgatgaaacacctacgacgcttatttctcattttagactccatcggattgatggttttttctattatcggtgcccaaattgcactcgatatggaatatggtcctattattgctgccattgcagccgtgatcaccggcgcttttggtggcgttttacgtgatatgctgtgtaataccattcccctcgtcttccaaaaagagatctatgcgggtgtcgcatttggcgccgcttggctctatatgggattactgttttacacgccactccctaaagatgtcgtgattattattacgcttgttgccggactcacggctcggctactcgctatccgctataagcttggcttacccgtatttaattatgaaaatcaagattagcgaaacggagtaataacaacagcaattattgtagattctgtggggtatctcaaagtatcatctatttctcgatgatgataaaaggcaattcctatcactgagacgttatttgtatgttaatattgggcttactcaatttttctcttatttcaaaacaaaaaaatagctgaattaagaaaaaaatagccctgtattaaacaagggcactgtatgtgcttcgaggtatgtgtatactatagggggatttgctccctagacatacatttatattaattctccagtcaaattcagaaagtcatcatgatccaaggaacactttatattgtttccgctccaagcggtgcgggtaaatcaagtcttattcaggctttattaaaaacacagcctttatatgacacacaggtttctgtctctcatactacccgcccaatgagaccaggagaaaaccatggtgagcattacttctttgtcactgaagaagaatttaaaagtatgatagcaagtggagattttatcgaacacgcttgtgtgtttggtaactattacggtacatcgggtaaagttatcaaacagatcttagccagtggcgttgatgtctttttagatatcgattggcaaggtgcgcagcaggtacgtaaaaagatgcctgaagctcgcagtatttttattctgccaccgtctaaagaagagctttaccgccgacttcgcggacgtgggcaagatagtgaagaagtgattgctaaacgtatgtcacaagctgtgtctgagatggaacattttaatgagtatgactatttgctcatcaatgatgatttcaatactgcgcttgctgatttacaatcaatcattcgctcagaaaaattacgccttgatcgtcaaacactacgacatggtgatttaatcagcaaattattggcagactgagataagtttcagtattatgcccagtcatttcgttaatggtggagtaacacaaatatggcacgcgtaaccgttcaagacgctgtagagaaaattggtaaccgttttgacctcgttctggtcgcagcacgtcgtgcgcgccagttacaagttggcgctaaagatcctttagtaccagaagaaaatgataaaatgacggttatcgcactacgcgaaatcgaagaaggtttgattaacggtaaaattcttgatgctcgtgaacgtcaagagcagcaagagcaagaagccgcagaattacaagcggtttcagcgattgcggaaggtcgtcgttaatcgtctcataaaataggggtaggtctgccttgtacctgtttgaaagcctgaatcaaatcgttcaaaaatacttgccacctgagcaagttgaacaactcaaaaaagcctttatcgtcgccagagatgcccacgaggggcagactcgttcaagtggtgagccttatattactcaccctgtggcggttgcctgtattcttgccgatatgcgattagatcatcaaacgctaatggcggcattgttgcatgatgtcattgaagatacacctgcgacatttaaagatatcgaaactctgtttggcagtacggtggcagatctggttgaaggcgtctcaaaactggataaattaaagtttcgagataaaaaagaggcccaggctgaaaactttcgcaaaatgatcatggcgatggtaaaagacattcgcgttattttgatcaaattggcagaccgaactcacaatatgcgcacgctgggttcactacgcccagataaacgtcgccgtattgcacgtgaaacgctggaaatttatagtcctcttgctcaccgtttaggtatacaccatattaaaactgagctagaagaattaggctttgaggcactacatcctaatcgctaccgcgtgattaaagaagttgttaaggcagctcgtggtaaccgtaaagagatgattaataaaatcctctctgaaattgaagggcgccttacagaagcgagtattcaatgcaaagttaacggtcgcgaaaaacacctttattccatttatcgtaaaatgttgctaaaagagcaacgttttcactcaattatggatatttatgcctttcgcgtcatcgttaaagatgtcgatacctgctatcgcgtgttaggccaaatgcatagcctttataaacctcgccctggccgcgttaaagactatattgctatccccaaagctaatggttatcaatcccttcacacttcgctcattggtcctcatggtgtccctgttgaagtacaaattcgtaccgaagatatggatcaaatggctgaaatgggcgttgcggcccattgggcttataaagagcaaggtgagcagccggggacaacagcccaagtcagagcacaacgttggatgcaaagtttacttgaattgcaacaaagtgcaggtagctcttttgaatttatcgaaaacgtgaaatcagacctttttcctgatgaaatttacgttttcaccccagaaggtcgcattgttgaattaccaacgggtgcgactccggttgattttgcttacgcagttcatactgatattggtcatgcttgtgtcggtgcaagggttgatagacaaccttatccactctcacagtctttacgtaccggacagaccgttgaaatcattactgcgccgggtgcaagaccaaatgcggcttggttaaactttgtcgtcagttcaagagcccgttcaaagataagacagttgctcaaaaatctaaaacgtgaagactctattaatttaggtcgtcgtctacttaatcacgctttaggccatcataaagtggcagatattccgctagaaaatattgaacgagagttgaagcgcatgaagcttcactcaatggacgatattatggctgagataggtttaggtaatgcgatgagtgttgttgtggcgcgtaacttattgattgacaaccaacaacaagaagaacacacacatctaagcataaccaatgacgaaacacctaaattacctattaaaggggctgatggtgtacttatctcatttgctaaatgttgtcgccctattcctggtgatcctattgttgcgcacattagccctggtaaaggcttagttattcaccacgaatcttgtcgtaatattcgcggttatcaaaaagagccagaaaaattcatgccagttgagtgggataaagatattgatggtgattttattaccgaaatcaaagtcgatatgataaaccatcaaggtgcattagcgaatttaaccgcagcaattaatgacgctaattcaagcattcagagcatgaataccgaagagaaagatggacgcgtctattgtgcatttattcgactgacagccaaagatcgcatccaattagccaatattatgcgtaaacttcgtatcatgcctgatgtattacgtgtcagccgtaataaaaactaattatgaatccaacacgctatgcccgcatctgccaaatgatggcgatgcggcaacctgatctcactgtttgccttgaagaagtgcataaatctcataatgttgctgctgtaatacgcactgcggacgcggtggggatccctaaaatccatgctatctggcctgaagaaaaaatgcgtatgctggtttctcccgcagcgggcagtaatagctgggtaaatgttaacactcatccaaccattgccgacgccatcaacacttttcgtgcacagggcatgcaagttcttgcgacccatctctcagataaagcggttgattttcgtgagattgattacacacaaccaacctgtattattatggggcaagaaaaaaccggtatatcaccagaagctattgcgctggcggatcaagatatcattgtaccgatgatgggtatggtgcaatctttgaatgtttctgtggcgagtgcattaattttatatgaagcacaacgccaacgtcaggcggcgggcatgtataatcgaaccgaaagtgcattaactgcagaagagcaacaaattttactctttgaaggtggctatccagtacttgctgaagtttctcgtcgtaaaggactgcctcgcccttatattaatgatcgtggtgaaattgaagcaccggactcatggtgggcagaaatgcaaatgacacaaaaacaacttaggaaatttaaactgacggagtaactttcccatgaaaggaaaactgcttgatgcaatccccttaaccactcttcacggcgtaggtgcaagtcaggcagataaactggccaaaatagggttagtcactgtggaagacttattgcttcatcttcctttacgctatgaagatcaaacccatctgtatgccatcagcgatctacttcctggtattccagccactgtttccggtgaaatcttaagaactgaagtaaattttggtcgtcgaaaaatgatgacctgccaaatttctgatggttcaggtattttaaccttacgcttctttaacttcacggcagccatgaaaaataaccttgctcagggtaagcaagttatcgcttatggtgaaataaaacgaggaagtcgaggccctgaaattattcaccccgaatacaaaattaaagtggctggctcagaagttaagttacaagaaacgcttacccctatttattcaacaacagaaggcttacgccagacatcgttgcgtaaattaatagaacaagccttaaccttacttgatacttgtgccattaatgaactgcttcctgatcaatttatttatggtttaccgccactcgctaccgcgttacgaaccttacataatcctccccctgatattgcgtttgctgaacttgaaaaggggcaacatcctgcacaaaaacggctgattattgaagaattattggcgcataacttaggtatgcttaatgctcgggcaggagcacaatcttatcgtgcagaacccttattaatgccacatggctcaacattacgtgaacaatttcttgcaacattgccctttacacccaccacagcacaacagcgcgtcgtcaatgaaatagaacaagatctagaaaaaaattatcctatgatgcgcctaattcaaggagatgttggctcaggtaaaaccttagttgctgcactaagtgcattaagagcgatagccaatggtaaacaagtggctttaatggcgcccactgagttactagcggagcaacatgccctcacctttagaaaatggtttgagccttttggtattcaagtggggtggttggctggcaaacaaaaaggtaaagcgcgagaagcacaacaaaatgcaatagctaatggcgaggtttccatcattattggcactcacgccatttttcaagagcaagttaagtttcactctctcgcattagtcattatcgatgagcaacatcgctttggagtacatcaacgccttgcattatggaaaaaaggcgaagagcaaggctttcatccacaccaattggtgatgaccgcaacccccattcctcgaacactggcgatgaccgcttacgcggatatggatacctccattatcgatgagctacctcctggtagaaccccagtaacgacagtggctatccctgacactcggcgaaatgacatcattgaacgtatcagggtggcttgtagcgaagaaaatcgccaagcctattgggtttgtacgttaattgaagactccgaagtccttgaagcacaagcagcacaagttatttatgatgagctgacgattgccttaccggaaatcaagattggattggttcatggtcgaatgaagccggcagaaaaacaggcggtgatggccgactttaaagaaaacaaactacagcttttggtcgcaacgaccgtgatagaagtcggggtagatgtacctaatgccagtttaatgatcattgataaccctgaacgattaggtcttgcacaattacatcagctacgagggcgtgttggtcgaggtgctgtggcttcccattgtgtcttattatataaaacgccgttaactcaaactgctcgtttacgtttacaagtgctcagagacagtaatgatggctttgttattgcacaaaaagatctcgagataagaggaccaggtgaactattaggaactaagcagacgggcaatgcacaatttaaagtcgcagacttattacgcgatcaggcgcttattccagaagtacaacgtatcgctcgttatttacatcaacattatcctaagcattcgcaagcgttaatcgaacgctggctacctgcaaagacccaatatagccaagcttaaacgacaccgtttaaatggcttagagcacacttgagggcttaatactgtaataaaaaacggcacagacttacctgtgccgttctcattcgaactagatgaacactgtcatcaccctgctataggcgtaaagaatggtagcatcagatacaatttgatcactatcgcattcactatatcaataaagaatgcaccgaccatcggaacaactaagaatgcaagatgagaaggaccaaaacgatctgtcacagcttgcatattagcgatagccgttggcgtagcgcctaaaccgaaaccacagtgacccgctgccaaaattgccgcatcataatttttacccataacacgaaaagtgacaaaaattgcatacaatgccattactgccgcttgaacaccgagaataaccaacataggtattgccagtgatgccagctcccataattttaagctcatcagcgccatcgctaaaaataacgataagctaacgttacctaaaacagaaacggctctatcaaatacacgataaaaaccgagcattgatagactattacttaaaataacgccaatgaacagtacacacacaaaggtaggtaatgagaaagccgtaccttctagtaactgagataagaaagtccctgccattaaacagatagagatcatcgcaatggtttccaataacaccattgaagtgatcattctccccgtagcgggtttctcaaaggctgtaggcatttcatgatcatcactgcctgcgccaggggttggaatgttacgaattaaataacgcgcaacagggccaccaattaatccacctaacactaaaccaaaggttgcacaagccatagccacttcagaggcactcataaagccgtagctttcaacgaatgttttcccccaagcggcacccgttccatgaccacctgataaggtgatagaaccggctaataatcccataagaggatcaaggcctagcatttctgctaatgcaatacctactgtgttttgaactaaaagtaatccaacgaccacaaacacaaaaataaatagcgcttttcctcccgcttttaagctggcaaggttcgcgtttaaaccaattgttgcaaaaaaagcgagcatcagtggatcttttaaggagagatcaaagctaatttcccagtccataaatgattttaatgcaagtaaaagagctgcaacaagtaacccacctgcaacgggttctgggatcgtataccgttctaaaaaaggaacagatttcactaacttacgtccgagtaaaagaaccaaagtggccgcgactagcgtgccataaacatcgagatgatacatttatgtaccccgtcttatttgttaattttgtataaaaaaactacgacgctaagttcatccatgaacaacgccaaaagcaggtataccccgattagaaaaaaaaacgacgataaacacaagttaaaacatataaaaatgtgagcgcctcttatgcattttgataacatcaattttacgcaaacgattgcttttgtggcgcagatcattaaaatacgctttttgccagataagaaattcacatcatggttacttcagaaaatcgtaatttgtcacaaagtagtcagatttcgccccaaaaaacgagtgaacttttattcgctttagaagaaaagcccccattactacaaacactatttgcggcttgtcagcatctattagccatgtttgtcgccgtaataacccctgctatcttaatttgccaagcattagggttacctgcacatgacactcaacgcattatcagcatgtcattattcgcctcaggtattgcatcactgatccaaattcgagcttggggtcccgtaggttcaggtttattatcaattcaaggcaccagttttaattttgtggctcctctgattatgggggggttggcattaaaaaatggtggcgcggatattccaacaatgatggcggctctatttggcactttaatggttgcttcacttaccgaagtgctattatcgcgttttttacatttagctcgccggattatcacaccattggtatcaggaattgtggtgatgattatcggcctttctttaattcaagttgggcttacttctattggtggtggttacgccgctattgaaagtaacacctttggctcacctaaaaaccttttattagcgggttcggtattagtggttattattttacttaaccgccaaagaaacccttatttacgtgtcgcttctttagtgattgctatggctgtcggttatattttggcatggtggctagatatgctacctacaccgcctgaacaacaagaaacaccgattatcaccgtaccagaacctttctattatggcctctcatttgattggcatttacttatcccactaatgctggtgtttatgatcacctcattagaaaccattggtgatattactgccacctcagatgtttcagaacaacccgtcagtgggccactttatatgaaacgcattaaagggggcgtattagcaaatggattgaactctatggtttctgcgttttttaatacctttccaaactcctgttttgggcaaaataacggcgttattcaattaacaggtgtggcaagtcgctatgtgggctatgtcgtagcagccatgttgattattttagggttatttccctctgtggcagaatttgtacaacgaattcctgaacctgtactgggaggggcaacgcttgttatgtttggtactatcgctgcatctggggtgcgtatcgtctctaaagaggcgctaaatcgtcgtgctattatgatcctcgccatctctttggccgtaggacttggggtatcacagcaacctcaaatattacagtttgcaccagattggctaaaaacattactgtcatccggtattgctgcaggcggtctaaccgctattattttaaacctgatttttccacccgaaaaataatcattaataaacttccaaataataaagcgctattttcataatcaaaaatagcgctttatttgttggtctttttataaaagcattgtcctttaagttacggtagatatttatctaattacttaaaaacaaaggagaatacaatgttgaccccaactaaaaactctgcactcgaatacttaaaaagtcatccatctactaaagaatttcatatagaaactattgggcaattttttacttatctcaaagattctattctttcattgtttaatagtgatcataaatttagctatttaggaaagatgtctgttgcagatttcaacttaatgtatattagaaaagatttgcatacttttttaactaatccatttctcaataaatcggaacataaagacaaagtaggcgctcttcagtactcatttgattacttgcagaatcaagcccatattacacctaacctttacaatgtttatcgctctggaaattttgagcctaacgaattgatttcacaattaattaattacggcaataagcttatcaaaaataatttaagcaccgaagaagcacaacatggtaaatatgttatagaaacattaaaagaggtattgaataatttagaaaaattatccaatacagaaaaaatgagactcagaatattaagtatcgttaatgaacggaagtaatctctttgatttacccgatgaatacttgagcatcaactcgttttcaggcataactgtatgatgttttgatggagtataaaacaggagaaaggttatgcgctggctgataaaaagtttggtatctctgatacttatcgttattttatttattattgtgatttatgcctttcttcagacacaatggggtgcgcaaaaaactagtgaatggttaacacagtatagtgattatgacattcgcttttccggtattgaacatgatttaactcaaccagaacaaattgttgtttatgatctgtccattaaccccaaacaagataaaaccgccgtattagcccaatcagcacaacttagatttaactggcaattttttactacggcgtctcatctgcaaaaaattactttagagaatggtaaaattattttagctaataaaatagctccccttcctgttagtgcagatattctccagtttaaaaatatgcagttagatagcatgccaacatctagcacaacattcacctttagcgctaacaaaataacgggaggtatcacaccttggaaacctacctcgaccgatcctattggtgcggggcattttcagttttccattgctgatggcatgataggaaaaaatagctttaataattttattgttgctggcgaatatcaaccaaatcgtattttgattgaaaaattagccacccagttccttaatggctcactctctttatcaggccaatatcaagataaccaatggcaacttaatgatgtttacttaaccggactgcgttggcaatccacaaaaaccttagaagagttacaacaatcattaagtcaatctccagcaatgactatcaagcaattgaacattgttgattttactgccgaagggaaacagtgggcaataagtggatttgctgggcagttttctcaaattgcgtggaataatagcctatcactgacatccggtgagctaaacaccgatgatattgtgtataaaaatcaacatgtcactgatgtgatcgctaagttaaatcagcaagataatttatttaacatagataatttaagcttacgctatgaaaaagggctaataaaactagcaggacaatggaacagcgagacaaagactttaaatattgaagatgcaacactctcaggtattttatataccctacctgagcaatggctctccttctttgctaaacctattgagcaagatgtgaagagtatcaatattaagcagctatcattaaaccaatctatcctcattgatattaatcccctctttccttttcaatttaccggcctaacaggccaactgaaaaatttaatcatcgccaaagatgggcaatggggattatggcaaggcgccgcgacgttaagtgctgatagtggcacattaaatggcgtagagcttcgccgccctgacctaacattaatgacacaacaagatactgccattatcccacagttttctgctttcgtagataaaggcatcgtgcgtggctctgctgcattagaacaaaacaataaccaaagactattttctcttatcgtcaatgggctgaatgtgcccctctctttgcctaataatatgggctggaaattatcgcaacctaccgatggaacaggacaatttaccttaaagcttaaaggcaacttagccgctgacgctgttataccgaccttaaatggtacattaataggtaaaaaagatgaccaaacgcctatcgatgacaggatgcaagacggcgaaataataaataatttatccttttgatggtttagcaggcgcatagattgcgcctgctgcaaaaagcgttacaatgcagactctttctattttcttattgcggagttttcatgtctgatgacaatttttccctgccaacaatcactcttgatgaatttcagcaagcacccttaaccgcacttgaaaatagtagtagtgtcgaagtgtgtgataataaccaaactccgttattttattgcctatcaaaacaggattatgacacgctaatggggcgtattatggatgcagaattagccgccattgtacttgaacgtcgccaaaagaaactcgatgaactggatttagagtgattgattgcagtgaggaataaagcgggataagcgctaatttctcccgctataggcgcttatttaactcagaatgacaaaagaaacaaactaacgttttttctttttacgccccggttgtgcaaagcgtttacgcgtattattttccgtctctttggcttttgttttcggaatatggatccctaacgctttcgcattactacttatctgtttcttaggtttattttgcttctgtttaggggcttcagagcttgatgcttcaatagcatcaaatagctttatcagctcatcatccgttaaatcacgccattccccgacaggtaatcccgccaaactaacattcataatacggatacgttcaagcttggtgacttcataaccaaaatattcacacatacgacgaatttgacggtttagaccttgtactaaggtgatacgaaataccattgcggcttcttttttcaccttacatttcttggttttttgtcccagaataggaacacccgcccccataccgcgaataaattcatcagtaatgggtttatcaaccgtgaccaaatactctttttcatgggagttacccgcccgtaagattttattgaccagatcaccatggttagtcaaaaaaatcagtccctgagaatctttatctaaacgaccaattgggaaaacacgggtgctatggttaacataatcaacaatattatctttctcaccttcatctgtggtactgacgatacctacaggtttattcagtgcgatcaacaccagctcagaattatcttgcgcttcaattaatcgtccattcactttcacttcatcgccagccgttacgcgatcgccaatgcctgcgcgcttaccattgataagaaccagaccttgctcgatataacggtcggcttcacgacgtgaacagataccgctttcactgatatatttattaagacgagtagataaattggtgtccatgcttccctccgtaaactgcggaatatacctcaattaagtgacgatagaaacactattaggtagacactaaagcagagatttctcactccccatttccatgataagaaaaaggtagaaaaaaagagagataaaaacaataaataacttaattttcaattaaatagagatttattatttagcactgtttattttgtgagggtaacacaatgtaagtgccgctaaaaaccgcccccgttccttcatcaccacaaatatcaacatctaacttaatacgtgctttgcttcctttcgctaatcgtcctaaatcaccacttaaattttccatatcagcaacggctgacggccgaccagagactggtttacgataacgaatatgcgcatccaccagcacaatatcgccttgcagtttatgctcttgcattaacaaccaaatcagcccccaaccggtcagtgttgctaaagaaaactggctaccggcaaaaatagtatggtgtgggttttgattaccggattcagggatcgtggtataaaaacgggtgcccgtatattgcgtaatacgtaaccccattttttcacttagggggatatgctgatgccactgtttttgtaactccgcacaccaatcaggacgatggagaatatcatctaatgattcaatactttttttcataaagtaatgtttgatcggggtagtttgaggacctgtgactaaaccacaattctcataacctaatttttcaaagaaacgaacggactcttctctggcgctacaaacaatacgctttaccccttcttgacgagctaaagactctaacgccatggcaactaaagagcctaatcctttaccttgagcatcctcacgtaccgccataaagcggattgcaccttcattatcggcatttatatagagacgaccaatagcaacgggttgcccactgtcatcaaccaccatctggtgatgcgctaaggtatcataaccatctttttcggagccttcgggctgatgtaacggtttacgaagcatttcccaacgaaaagtataataagctgctaattctgcttgcgtcttaggggttcgtaaatgatacatagtaagctcctattataattcaactagacctgcaaccagaatgtcactgggccatcattagtcagggtgacctgcatatcggcggcaaattgccctgtttgggtttctaaaccttgttgcttacactgctcaacaaaatagtgatataaattttcagccatttcaggaggcgctccgttagaaaaacccggtctcatccctttttgggtttcggcagccagtgtaaattgcgatacgactaataggctaccacctgcttgttgtacattcagattcattttgtcattttcatcactgaaaatacgataaccacacactttttcacacaatctttttgctttctgttggttatcgtctttttctactcctaatagcacgagtaagccgtgattaatggcaccaacagtcacaccggcaatatcgactttcgcttgtgtcactctttggattaacgcaatcatactgtattcctgattaacaccgaatatgtgtttataaaaaaaggataacaaattcaattaattgttatcctattacaacgttattctgttactgggagagtaaaatcatgatctttaaagtattcaacaaccgtatttttatctacgacatgaacaccttgaatacctaacgcaatggctgcatcgacattagtttgtaaatcgtcaaagaagacagcatcttgtgcttcaacgccttcggactgtagcacatatttatacacttcaggatctggctttctcataccgatatcttgggataaatagagaaaatccgctgaagcggcgatttcaggatagtgctgaggccaataatcttgatgtaatcgattagtatttgacaataccaccacacgatgaccttgctctcttagcttattcattatatctatgacttctgggcgaacagcgataaaaatagcctgccatccttccgcaaactgttcaaaactcagtccaataccaagctcagcacagacagcttctgcaaattctatatccgtaatattgcctcgttcgtgtaatttaaaggtttccccagtcgtaaaattatcttttatactggctaatggaaccccactgagtttactccacacggcaaaaacacgattgaaatcaatatcgataatcacattacccatatcaaagatataaagcataaattctctccataatagaaaactcgttttactttaatcataaattgcttgagtgaataggcttaaacgataaaaaataccatattcacacctaattttttgaaaaacataaaaccagaaggggaagagacgaaaaataagacgagaagcatccttatctataaaggaattgccatgtgatgataaggtactctctccccatttattttcctatgattttaaaatcatcatgcaactgtgcccaatgtaatactaatttctctttatgctcatcaagcatttaaaatgccatgtagctgaatattaaggccttccactttctcgatttgtttattcataccttattcctctgttttaaaccaaaagtcgagatcatccccatcatctttcaaatcaatttcgcttttattcgctatcacagtacttgcaatcatagggtttatattagaatttttagccttaattgataactctaaatctagtccttctaatactcttaataaggttgatagttttaaatcacttcctgattctatacgttggtattgttgctgtttcataccgatacgtagatacatatctttttgctcaatacctaattttttacgttgttccgctattaaattagcaatttcattaatagtcttcataattaactctaaaccatttcagtgattacattagcattatatacaacattttagttgtatataaacaaaaaacaacttataaattgtatacagcaataaaaacaactttcaagttgtatataagacaagaaacaacacttgagttgtaaatggaaatcaaggaatgaaaaataacaaaagctagcattataggtatatcagcgcattatccgaactcacttattcatgctaatgcacaaccatatgaagatattactattagatatgaaagtatatcttgggatcacatttgtgcaggaatgtcaggtgatagtattagtcaaaacatttaagatttctcaacaaaaagtgatgtggttcttgatttttcatcaatagatatttttatatgtatattatctttaacccatcgctcttctttatagaaatcatcatatgtagaggtgaatccatttttagatagattatcaataagagctatgttcttttcaggttttatattaaaaaaaataacatcattggactcatttgaatttccatctatgggtctatagataatgatatattcatctgatataaaatctatttttttgacctcatcaaaagtgtataggtaataataaacgaaatttaacttggtatattctctgtcaccaggaaacatcagtaaaatgatggtcgtcattaaagataaaatcaataatattggaaaaataaaaaatttattcaattttaatccattcactttcagctccaatgtttattcctgttgtatcttttacatgaattaaaatactattatttctaatatcttctatcggttttacgcgatccaaatagcatggtaatgaaacgaagtaaggtcttgcattatttggataaatagcaggatcaggaaaaattaacggtttgaaaagcttatttttatatttactaatagagccgtaataatcccagcgacgataagcctcttctttacttaatactgttaaatatgtcattgggtctacgtcactaacatagtctcctgcagttagaacacccattaaagtggatgcatcttcaccttttgcatgacttttatctatccatccaatttattttgtgtagataagtctgcctccatcaatatctgatctttttgtcattatcacacatcttttgttattacattttagttttagataagaccgtattatgttaaaaaagccagtaaattactggctttttagtgttataaaaataaaaacggcaacgcatcccaaaaatatcaaacatgagtccagtcctctatttttagtccttcaactcgtgaaaattcacgggtattatttgttaccaatattgcattaaccgcgacagcatgaccagcaatcgcgctatcattatttcctatgggcaatcccacatcagataagcatttttttatcacggtagttgcgtctaccgccgctttatcccatgccaaaatcgcgtcaacgcgttcacagaaagcatcaaccaaacgattgtgtttaggtgatgctttttttcctattgctccaaagcgcatctctgaataagtaatcgctgatatgacaatagtatcgtggttcattacacatttctgaagtttttcgagcaaagaaataggttgctctcgcatgataaaagaacaaatgtttgtatcaagcatatagacttttttcacagaataactcgtccttcttcaataacatcatcgcgttcaagcaagaaatcactgtcggctttttcttcgttttgtaatgaaatccagttaggttttacagggcgtaaaataatacaatccccatctcggcttatctcgagttcattgacaccatcaaaatcgaaatctttaggtaagcgaatggctcggttacttccgtttttaaatacagctacagttctcgttctcatatcagatacctcttacgttagcatatgccaaatatatgccttcgtgtgacatatgtcaacatatgcatgggtatgtaagacccgagtaccctatcaaacacccaaaaccatactgaaagtttagaacggtttctgtgctgttcaatggcatttttaacatttcttttttaaacctaaaaatacggttaacgtttttaaaagtagccaatgatttatgagatatcggatgaaagcgaaaaaagtaaaacccgagactgagatgcacaaatggaaaaggttcaaccaaatgataaaaggaaaaatcggtttagtccggcgcaaatagaacaatggaaaaaggagcaagaagcccaaaagcaatgagaagcatgactgactgaaagtaaagaggcaataaaacgtcacatgaaagacttatagcatttagcataaaaacctaatgcctcaatgtggtactaatcaaaacagagcgaagcgacaacatcttcttgtctttgcttttctccatgatcggttattgtgccttagctcgtgcaactagctaagttgggtacttctggttaggttgggcttctttcgatggtgcaatcgaaaaatctctagtccgttgattggtgctcttatcaggtacgcactgtaatctttcgataccgcaagggtagagctaggatcacttcacagaagtgacggggttttataaactcagggcgcttaacgcgccctaagaattatattatcagaataacaaattagtctttgctacgataagcacgacgacgatcgttttctgagagatgacgtttacgtaaacgaatagattgtggagtcacttccactaattcatcatcatcaataaactctaatgcttgttctaatgtttgcttgatatgtggcgtcagcgttgtcgcttcatccgtaccagaagcacgcatatttgtcagttttttacctgttaagcagtttactgttaagtcattagagcgagtatgaataccaataacttggccttcataaacttctgcaccatgagtaacaaataacttaccacgatcttgtaagctatatagcgcgtaagcaacggctttaccctgaccattagagatcatcacaccattattacgacgaccgatttcacctgggcgcacatcgtcataatgactgaatgttgcgtacagtaaaccagtacctgatgtcatcgtcataaactcagtacggaagccaattaaaccacggctagggataatgtagtctaaacgtacacgtcctttaccatctggttgcatgtcgcgcatttcacctttacgctcacccatcgcttgcatcacatcaccttggtgctgctcttcaatatcgatagtgacttgttcgaaaggctcttgtttacgaccatcaatctcgcggaagataactttcggacgagatacggctaattcgtaaccttcacggcgcatattttcaatcagtactgataggtgtaattcaccacgacctgatacacggaatgcatctggatcttcagtctcttcaacacgcagtgctacgttatgaactaactcttttttcagacgatctaaaatctgacgagaagtaacaaacttaccttcacgaccacagaatggtgatgtattaacacagaaatacatgctaacagtaggctcatcaacggctaatgcaggtaatgcttccacagcacctacttcgcaaatcgtatcagaaatatttaattcacctaaacctgtaatcgcaatgatgtcgccagcttctgcaacgtcaacatcgatacgctctaagcctaaatgacctaatactttacctactttaccgttgcgggtattaccttcgctatcgatgatagtcacttgttgattaggttttactttaccgcgcttaatacggccaataccgataacacccagatagttattataatctaactgagaaatctgcatctggaaggtcccctccagatcgacttttggcggctctacatatttgacgatagcttcatataatggagtcatatcatcagccatgtcattataatctgttcccgcaataccatttaatgctgatgcatagataattgggaaatccagttgttcgtcagtcgcacctaagttaacaaacagatcaaagacctgatcaacaacccaatcagggcgtgcacctggacggtcaactttgttgataacaacaataggttttaagttgttagcaaacgctttttgtgtcacaaagcgagtttgtggcattgggccatccatcgcgtcaaccagcaatagaacgctgtctaccatagacataacgcgttctacctcaccaccgaagtcggcgtgtcctggggtatctacgatattaatacgatagtcattccatttaatcgctgtatttttcgcaagaatagtaattccgcgctctctttcgagatcattagagtccatcacgcgctcagcaacggtttcacgttcaccgaacgtgccagattgctgtagtaatttatcgacaatagtagttttaccatggtcaacgtgggcgatgatggcgatattacgcaagttttcgatcacaaaatttgcctcaggcattgtagaaataagcgtgttattgtacacgctttagacgagagactaaacaagatcacaataatgattgcttaacaatatgcaattaattgaattgtgatccttttcacgcctcagaaataagtcgtcttgaaccgattgcaccaaaattgtgcaactattcagacttaatttgcaccaaatttgtgcaataattaaaaaatcacgggggatattctacactaaacttcatcaatacagtatatatccctttttagataagttggcatgcttttcgcaatagaatttaggtgagcaaaaaattcaccgaaaaatgtgtaaggccactgcacttaataaaaccattcgccaggagagttactatgtcccttgaacatgtgttatccatgattgaagaacataaagttagatatattgacttacgtttcactgatacccgcggtaaagaacaacatattactattccggcgcatcaagttaacgatgatttctttgaagaaggaaaaatgttcgacggctcctctattggtggttggaaaggcattaatgaatcagatatggtgctaatgcctgatgctacaacagcgatgcttgacccatttttccaagatccaacattaattattcgttgtgatgttttagagccaggcactatgcaaggttacgatcgtgacccgcgctctatctcaaaacgtgcagaagactacttaaaatcaagtggtatcgctgacaccgtcctatttggccctgaacctgaattcttcctttttgatgatattcgttttaaaaatgatatctctggtgcttcttatgccatcaatgatattgaagcagcatggaataccaatacacaatatgaagaaggtaacaaaggtcatcgcccaatggtaaaaggaggttacttccctctccctccggttgattcctcacaagatattcgctcgaccatgtgtaatatcatggaagagatgggcttagtggttgaagcacaccaccacgaagtcgcaactgcaggtcaaaatgaagtggcaacccgctttaataccatgaccaaaaaagcagatgaaactcaaatttataaatacgtagtacaaaacgtcgctaacgtatttggtaaaaccgcgacctttatgccaaaacctttagtgggtgataatggctcaggtatgcactgccacatgtcactgtctaaaaatggtgtcaatttatttgctggtgataaatatggcggattatctgaaatggcgctgtattacattggtggtattatcaaacatgctcgtgcattaaacgcatttactaacccaaccactaactcatataaacgcttagtgccgggatttgaagcccctgttatgctggcttattctgcccgtaaccgctcagcatccattcgtattccggtagtcgctagcatgaaagcacgccgtatcgaagtgcgtttcccagatcctttagctaacccttaccttgcatttgcagctcaattaatggcaggtcttgatggtattatcaataaaattcacccaggtgatgccatggataaaaacctctatgacttacccccagaagaagctaaagagatcccaacagtggcaggttcattagaagaggcgctcaatgcccttgataatgaccgtgaattcttaacccgtggcggtgtattcactgatgatgctttagacgcttatcttgagctattacgtactgatgtgcagcgtgttcgtatggcaccacatccacttgaatttgaaatgtattacagtgcgtaacgcacaatagttaaagtacttactttgcttatgatttttttgttgccgtgaagctattttgcccatcttcggatgggctcttttctctctaatgaggcatctgttaataaattacgcatctgttcatttatgaaaaaaaaggtaagatgcactaaaatggtgcaatgggagtattcaatatggaaacggcggatttacctgataacacacttattttggattcattaatccactcagtattggttatcaaccaagagtttattatttgctatgcaaaccatgctgcattgcaattactggctcaaagtcgtcgcaaattatttgaaaccccttttagcgcactgtttagttattcctcttttgatgaacagttaatgcgtgaaacattagcaaatgggcaaagcttcactgataacgaagtgattttggttattaataaccaatcacacactatgtcgctcagtgcccagcctatttccgagcaacacattttgttggagctggcgcctatggatagtcaacgccggttaagccaagagcagatacaacaagcacaacaaatggcggctagggaattggttaggggactggcacatgaaattaaaaatccactcggtggattacgaggggcggctcaattattagcaaaatcattacctgatcctgcgctgactgagtatacccaagtcattattgaacaagccgatcgcctaagagcgcttgtggataggttactcggtccacaacatcccggcaccaaaacctttcagagtattcatcatgttgtagagcgtgttgcacaacttatcacattagaatgccctgaaaatgtcaccttactcaaagattatgatcctagtctacctgagctttcacactatccggatcagattgagcaggtattgttaaatatcacccgtaatgcattacaggcagtggagaaaactgggggaactattattttgcgaacccgaacagcgttccaagtcacactgcagggtgaacgtcatcgactagtggctcgcattgatgtgattgatactggcgcgggtattcctcctcatctacaagacacgcttttttacccgatggtcagtggcagagaaggcggaaatggccttggtttatccattgcacgtagcttagtcgaccaacacgccggtaaaattgagtttaccagttggccgggaaataccgagttttctatttacttgccaataaaataggagataaccaatgcaaaaaggaaatatatgggttgtcgatgatgatagctctattcgctgggtacttgagcgagccattacacgagaaggccttacatgtaaaaccttcgaacacgctaatgacgtcctcagtgcactcaatagtgaacttcccgatgtattattatcagatattcgtatgcctgatattgatggtttatctctattaaaaagcgttaaagagcaacaccctacgttgccggttattatcatgacagcgcattctgatcttgatgccgcggtaaatgcttatcagcaaggggcatttgattatctccccaagccttttgatattgatgatacacttgcactcattcatcgtgctattacgcactatcgagagcaaaaacaacctaatacaacagaaactaaccttcaatctgtctctgacatgattggcgaagcccctgcgatgcaagaggtttatcgcattattggccgcctttctcgctcatcaattagtgtgcttatcaatggcgagtcgggtactggtaaagaattagttgcacatgctcttcatcgccatagtccgagagcacaagccccttttattgcactcaatatggcggctattcccaaagacttaattgaatcagaactttttggtcatgaaaaaggggcatttactggtgcatctcaagtacgccaaggccgttttgaacaagcaaatggcggttccctctttcttgatgaaattggcgatatgccactggatattcaaacccgcttattacgcgtcttggctgaaggacaattttatcgtgttggcggttatgcccctgtgaaagtcgatgtgcgtattattgccgcgactcatcaagacttagaaaaacgcgtaatggaaggtgattttcgtgaagatctctaccatcgactcaatgtaatacgtattcaattgcccccactgcgtgatagaacagaagatattccaagcttagcgcgttattttctccaaaaaaccgctcgagagcttggtgttgaaaccaaagtgctccaccagcaaagtttacattgcatgatggaataccactggtcaggtaacgtcagacaattagaaaacgtatgtcgttggttaacggttatgaccgctagccaagagattatgccgcaagatttacctcaagagatccgccaatcagatgagaagagcaaatcgatacctcgagtctcctctcaacattggtcacaacatctttcattatgggcggatgaggtattcagtgaaggcaaagaaaatattcttaatgacgctctaccgcaatttgagcgcaccttactactcagtgcgctttcctatacaaaaggccataaacaagatgctgctcgtttattaggatggggaagaaatacgctgacacgtaaattaaaagagttaggtatagaggagttttaagtcactcccctcccttttatttttgcccactaaatcactcgagagaattggcgttggcgcatttgattacgtaaataagtatcaaaacacatacaaatattacggatcaataaacgtcctcttggagtgacctgaattttttctgcgctgatctccaccaatccatcttctaccattggtgcaagcaatgctaagtcttctttaaaataatcttggaaatcaagctgatatagattttcaatctcagtaaagttaagatggaaattacaaatcaaggtcttaataacatcgcgacgaatacaatcatcatgagttagagagagtccacgccacaacgcatgcccttcgctatttacgcgagcataatactcttttagcactttttcgttctgcgcatagtgatcacccagcatactgatagctgaaacgcccattcccaataagtcacactcttcatgagtggtatatccttggaaattacgatgtaaaataccttggcgttgtgcaaccgctaattcatcatcaggcttagcaaagtgatccataccaataaactgataaccatttgtggtgagtgtggtgatagtctcttgcaagatctctaacttttcttctgcaagtggtaaatcttcatctttaattttacgttgtgcggcaaataaattaggtaaatgggcataattgaacacacttaagcgatcaggggacaattcaatcactttttttaacgtaaaagcaaaactttctttagtctgtttaggtagcccatagatcaaatcaatactggtagaatgaaagcccacttcacgcgctcttgctactaatgaaaagataaatgcttcatcttgttcacgattaactttttgttgtacctctttattaaaatcttgcacccccatacttaggcggttaaatccctcattgtgtaaatgatcaataacatctaactcaatctcacggggatcaatttcaatagagagctcagcattttccacaaaatgaaaatgttgtcttaataaagcgactaagcgactaatttgctgtttatcaagaaaagtgggagtaccgcccccccaatgcatttgggtcacttttctatttttaaaatagcgagcgcgattaataatttctttttctaaaacatcaagatattcatcagctttatgtttatggcgcgtgataattttattacaaccgcagaaataacataacttatggcagaaaggaatgtgaatatacagtgacagaggtcgttcgggataacgctttgttgcttgttcgaaatccgcatcactatattgctgattaaattccaatgccgttgggtatgatgtgtagcgcggacctgaatagttatacttatggatcaggtcaagatcccaaataattgtttgttctgacatgcttctaccttccaaaagtgaaccgccgatgtgccataccagccaacagacattatgaccaccagaaataatagtgtaaccaataaatgcttaactgaacacgagagaaaaaaagatcctgtttttgaccttttcactctatctgtaaataatcactcaagtaaaaaatatgatatagatcacattaaacggaaatagtattactgttaaaatttatttatgaataaattaagtttattcaatatgttagtagcgcattttaataatacatcttttttcgattatttttataacacattaaaaaaaatatattactcaaaatacactttaaaataaataaatatatcgttttattaattttattatatttttattctctcataattcgatagttataattataatgataattagccctttacctaatttataatattacatactctatatttaaacattgattaatatccaattaagtcgtgttttgatttaaatttgaggctcagtaaaagaataaaggtcgctatattacaaggaaagatagcactccccattaccttttcgcattcattctgatatttctcttatttaatcgtctctttatatattccgaattaaggattatgcgccacggaaggaaatggacaatcaaccaaggatggttagttctctgcgatatatcatttccccccttaatgtttcactctcaaatcagtagtctcacgctgtttatataaaatgcagataaaatcacccaatataaataagaataattattatttataatagataaataaaaacgcggcttatatttacaatataaaccgcgtcttttaaaagagtaatcactataacaaactgttattgtccctctttttcatagtggggagagcgaggaccatataagatcccattggcatgtccagcagagagtaaacgcacacttgctactcctgcaatttcgtgacttttatctgcaatagtatcaacaatttgagtcactactgcagaaactaacatgcccaccaaaccattcgatgctgtatccccttctgcactcgatgcactggcatgtccactccacagtaaggcaccattacgtaaatcaaccaatttagcactggcactgacacgcgtctcactggcgatcacttgataagaagtaccatattgggtgacatccaaatagagcacagaatccgcaccaaaaatctcacgtaacttactaggactcaccgcttggatatcgcttcccgttgacaaaccattttgtttaaaggtctcttcaacaacggcgacaggaaaaacataatagccagcttccgccaaaggataagtcacttgagataaaaaactatgggcagcttctacttctggagtctgatttttaggtaacagcactaaaatgctttttggtttacttgctttaaaggcggtatagtctgttttgactggctctgcacatcctgataacacaaaagcaaatgccacaaaaactaacgttaaaatgcgattcatttttgtgctcccttatttttcatcagaaaatccataaactttgctgattcaggataaagagttttctcctgatcaaactcactcatggctaagtctaatgcgccagtggtcacatataacatgcccaaatgtgcatgtaaccccggtggaacgcctaatgatttcgctcgggcaacctcaatgctttttttcaatgcatcgatttgcgcatgaggatcactttcactttgttgataatattgatataccaccgtttgataactatcccagttataaagaggctttggcgcttggcacccaaccaataacaacgaggcaaatagcaaccccagcaatgattttgacatttttatatccttataaaattggggttactgctcaggctgccaagcatggctttcaatccctgcaactaaattattcaccgcttcacgaatggctaaatcaagcactttaccattaagtgttgagtcataacttgctgtgccaccaaaaccaacaatctcacgattagaaagctcgtattcccccgcaccttgcgtagagaacaccacttcagaggtattcacattcacaacatttaagttcactttggcataagcaacttgggtttttccacgtcctaagataccaaatagttggcgatcacctacttctttgcgaccaaactctgtcacatcaccagtaataacgtaagttgcgccttttaattgctgactttggcctttaatcttcgcttcttgtgttaactccgttaagttagcgcgatctaaaacattaaaacggcctgtttgttgtaaatgtgtaattaaaatcgttttagattgattacccaatctatccacaccatcagaaaaaataccattcatgtaattagaacggttatcaaacttaccaatagcaatggcactcttaggtcctgagtaagtcgtattataggtagccactttagcaacctctaaagagcgagaagattctgaggcacaacctgctagtaatgaagcagaaagtaaaactactcctaatgataatttattaaatgtcattttcatcatccaatatcggtgaaataaacctatcgtcattgattttttgttgtgcaaatcctatgacgaacaataaaataagataaattttaatttacgtttctattttacccgccattaaaccataacagtagtaaggttaataatgggatcaacttatttttaatataaaattaatcacccatagggaaaatagaaaaatgttgataaaagaaacaacaaatgaatataaagataaaatacgttatattctatctattatattagcaatataccttaagttagataaaagcagactaagacaaaagactaaaagtatattttatattaacaaaataatttaattgctgattacttttggctttttattcatcaaaccatagattgagtgaatagttatgaaacgtgaagtaatacaatttattacttcacgttaatattgatggctacctataagatattagcgttttttaccaaatgctgcggccaatgcatcactcatcgcactattacctgcattgttacccgtatttgattggcggtttctggtcggtttttgcccgcgactatgtttagaagcattatccttagtcactgactgacgtttatgatcactatcagcagccacttcatctaaacgcatggttaacgcaatacgtttacgcggtaaatcgacttcaaggacttttaccttcacaatatcgccggtttttaccacagtatggggatcttcaacaaatctatccgacagtgatgaaatatgcactaatccatcttggtgtaccccaatatccacaaaggcaccaaaattagtcacattagttacagtaccttccaatatcataccactgactaaatcattcattgtttcaacaccttcggcaaaggtggctgttttaaactcaggtcgaggatcacgccccggtttagcaagctcctttaagatgtcattaatggtaggcaaaccgaactgctcggtgacaaactctctggcattgatttgtgaaagtaatgcactattgcccatgacttgatcaattttttgatgtattgattgcaagatattttcaacaataggataggcttctgggtgaaccgtagaggcatcaagtggatttttaccatcacgaatacgtaaaaatcctgcacactgctcaaacgctttaggccctaagcgcgccactttgagtaactgttttctatccacaaaacggccattttcatcacgccaagcaataatattttgagcaatagattggctaagccccgccactcgcgtcaatagcggtacagaggctgtatttaaatcaacaccgacaccatttacacagtcttcaacaacagtatctaatttttttgccaataatgtttggctcacatcatgctgatattgacccaccccgatagatttaggatcaatttttaccaattccgccaatggatcttgtaagcgacgagcgatagaaacagcgccacgaagagaaacatccagatccggaaattctttagctgccagctctgatgccgaataaaccgatgccccggcttcgctcacgatcactttttgtgctttaacttctgggtagcgttttactgtatcagcaaaaaaacgctctgtttcacgtgatgcagtaccgttaccaatcgccactaactctacattatgcttaatacataatgccgctacactagcagcggctttatccgcttgtccggtatgaggataaatagtatctgtcgcaatcagcttaccggtactatccaccaccgcgactttaaccccagtacgtaaaccaggatctagccccatcgtagctcgcatacctgcaggtgcggccattaagagatcttttaggttacgtgcaaacacattaatggcttcatcttccgctttctcacgtaactgacccattaactcagtttcaagatgcattaacacttttatacgccaagtccagctgacaacggctttacgccaactatccgcgggttgattattaagacgtaaacctaaatgctccgtaatcaactgttcgccatagctctctttgggggcttcttcgaattgtggatcaggattaagtgataactgcaaaataccttcattacgaccacgaaacatcgctaatgcacggtgagaaggtacatgagcaatcggctcatgagtatcaaaataatcgctaaatttagcgccttctgcttcttttccgtcaacaactttgctaacaagatgcgcatttttccataaatattggcgaactttagctaataatccagcatcttctgcaaaacgttccattaagatatagcgagccccatctaaggctgctttactatcatctatgcctttttcagggttgatatatgcacttgctgcgtcttcaggagtatgttgtggttcattccataacaaatcagctaatggctctaagccattttcaattgcaatttgtccacgagtacgacgtttcggtttataaggaaggtagagatcttcaagttctgttttactttgcgtctcattaatcgaagagcgtaattcttctgtgagtttcccctgctcttcaattgattttaaaatagtttggcgacgatcattgagttcccgtaagtaactcaggcgggtttccaattgacgaagctgagtatcatctaacccaccagttacctcttttcggtaacgggccacaaaaggcaccgtattcccttcatccagtaacgtaatggccgaaagtacttgctggggctttactgatagctcttgtgcaataattcggcttaatgattcattcataatatatttacctaccgagaggagtggttaaaaaagatggctattatacacgcgcaataagaaaaaaattccgcttattataggccaagcatgacatttatgaggaaaataacagattattctgtgattcgcgctatagtatctgtatgaaattcaatgttgatgatcgtatttattggtaatggcaaaaagtaactatattactcgtgatggctggcatgccttggataaagagctaaaatatctttggaaagaagagcgtcctcgcgtcactcaatcggtctctgaagcagcggctcaaggtgaccgttcggaaaatgctgaatatatctatggtaaaaaaagattacgtgaaatagaccgacgagttcgttttttatccaaacgtcttgatgaattaaaaattgttgacccagatcctcgtcaagaaggaaaagtgtattttggcgcttgggtaacccttgaagacgatgatgaaaacattaagacatttagactagtcggccctgatgaatttgacccagcaaaacagtggatttctattgattcccctgtcgcgagagcgctgatcggtaaaaaagtggatgatgaagttagcgtgcaaacgccaggtggcatcgttaattactgcgtattatctatcaaatattattcggaataagataaataaatagtgtgatattctaagatacaaagtcagaacaagttttgcctataaatcattaatatttattctttgtttttggtttaatattcttatcaatgatagaattcgctaataaaagcatttgcacttcgggagcttaaagatgcaagacagttataaagtgctgattgtggatgatgatttacgtctacgttcactattagagcgctatttgacagagcagggttttcaaatccgcaccgcggcaaactccgatcaaatggatcgtttacttactcgcgaatctatccatcttattgtcctcgacttaatgcttcctggcgaagatggcttatctatttgtcgtcgcttgagaagccaaaacaatcctatccctattattatggtgactgccaaaggggaagaagttgacagaattgtcggacttgaaattggtgctgatgattatatctcaaaaccatttaacccaagagagctattagcccgtattcgtgcggtgcttcgtcgccaagccaacgaactaccgggagcaccttcacaagacaatgcgattgtctcatttggtaaatttaagcttaacctcggtacgcgggaaatgttccacgaagatcaacatatgcctttgaccagtggtgaatttgccgtattaaaagtccttgtttcacatccccgagagccattatcacgtgataaattaatgagtctggcgcgaggtcgtgaatatagtgcgatggagcgttctattgatgtgcaaatttctcgtttacgtcgcatgattgaagaagatcccacccatcctcgctatattcaaacggtttggggactgggttatgtctttgtacctgatggaacgagcgtatcataatgagaaggctgaggctttcaccccacaataagctcactcgctctctatttctggttatctcattacttttttttagcttgatagccagttatgttgttgtacagcatcttattgtcgggccaagcctccagcaatttaataaagtattagcgtatgaaattcgtacgctagtaccggaagaactgatcttagtcgatggcaccccacttaaaatttctcccgctctacgtaataaaatttacaacgagttaggtatctcattttttgataaagacgccgctttaaaagctggtttagagtgggcaagagaagatttagaacttagccagcagatgacggattatctcaatagtgatacgacgatttggctagaaaacaccctagagtatcctattttatggattaatacccaactctcacccacgctatggatacgcgtaccacttaccgaattagggcaaaatttcttattacccgtttatcggcaagccattatttttatcatcatcgtagtggcatttttctggttatataaccgttttcaaaatcgtccattgcatgaagttgaatatgcagcacgacgcattggtaaaggggtgatccctccgccaatacctgaatctggcactgctgaaatgcgttcaattattcgagcatttaatcaaatgtcatcagatattcgctcattagataatgatagaacactggtgatggcaggagtaagccatgatttacgcactccgttaacgcgtattcgtcttgctacagaaatgatgagtcctgaagatagttatcttgcagattctatcaataaagatattgaagattgcgatgccattatcggtcaatttttagactatatgcgcacaggcaaagagatgtctttagaattatgtgatatgaatggtctattgcgagaagtgatctgcgctgaatctaactcaggtaaagtcagcgaagagcatttatacccttatcctatcaatatcacagcaaacccaattgccgtcaaacgggcgcttaccaatatgattgttaatgccacacgctacggacatggttggataagcatcacaagtaatcaaaatgaagaatatgcttggtttcaagttgaagacgatggtccaggcattgccaaagaagatagacaacgtttattccaaccctttgttcaaggggaacaagctcgaagttcaaccggtgcgggtttaggtctatccattattcgtcggatcatggatgcccatggtggctttgtcgaactcggcgatagcacgaaaggcgggttacttatccgtgccaactttccgttaaaagtgcaagaagacgaagatgattaatatcctcacttttcaacgttaacgcccttcttattctttctcacctatttttatgcattattttcactctttttctgctttgtcataaaactgtcacaattaagacatttaattgtcatctaactgacctattgtctgtgcgtaccgtaaccgaagttgatagatgtcgaaaagttattctacctatcccacaggagggattatgaaactgatgcgtaccaccctgaccagtgtcattgccgctgcactttcaatgacggctctttctgcacaggcaacgacctcactgactggtgctggcgcaacgttccctgctccagtttatgcaaaatgggcagatagctatcaaaaagaaactggcaacaaagttaactaccaaggcataggctcttctggtggtgtaaaacagatcattgctaatactgtcgattttggtgcttctgatgcaccattagctgatgaaaaactcaaggctgacggtttattccaatttccaactgtcatcggtggtgtggtgatggcagtcaatatctcaggtattaaatccggtgagcttgtcttagacggtgagactatcgggaatatctacttaggcaagatccaaaaatggaatgatcctgctatagctaaactaaatccaaaactcaatctacctgaccaaaacattgctgttgttcgtcgtgctgatggttcaggcacatcattcgtttttactagctacttatctaaagtaaatagcgcatggaaagatgaagtaggcgcaggctctaccgttaaatggcctacaggcttaggtggtaagggaaatgatggcatcgcagcctttgttcaacgtctaccaggctcaattggttatgttgaatacgcttacgcaaaacaaaacaatcttgcatatactcaattagtcactgcagatggcgaagttattcctcctactgccgatagttttagcgcagcagcgagaaaaattgattggagtaagagctttgcacaagacctaacgaatcaaaaaggcgaaaatgcctggccaattacttctactaccttcattttagtgcatcaaacgcaaaaagatgcggctaaaggaaaagaagtactgaatttctttaactgggcatatgaaaaaggcaatgatgaagcgaaaaatcttgattacgccgtattgccaaaagaagtggtagaacaaattcgtgccgcttggaaaacaagcatcaaagacagtaatggtaaaccaatttactaaccaaagggttaccattaaaaaatagattaacgttcaccccctgcaacacagggggtaataaattaaagaggctttatggccgagcatacaacggtaataaaggccccgagtaaacgaggggacgttatttttagcgcactagttcgactagctgcgttaattacacttttgcttttagcaggtatcattgtttcactgattttcgcctcatggccaagtattcaacaatttggtctgtcattcttgtggacgaaagagtgggatccacccgcacaggaattcggtgctttagtaccaatttacggtactgtcgttacctcaattattgccctgatcattgcggttccggtgagttttggtattgcactctttttaacagaactggcacccaattggctaaaacgcccattgggtatcgcgattgagttattagctgctattccaagtatcgtttatggtatgtggggactctttatctttgcgccgctctttgccacatacttccaagagcctgttggcaacgtgctctcatcagtccctattgtcggtgagttattctctggccctgcgtttggtatcggtatattagcagcaggggttatcctcgcaattatgatcatcccttatatcgcgtctgtaatgcgtgatgtatttgaacagaccccagtgatgatgaaagaatccgcttacggtatcggctgtaccacatgggaagtgatttggaatatcgttttaccttatacccgaaacggtgtgataggtggtgtgatgcttggattaggtcgtgcgctcggggaaactatggctgtgacctttattattggtaacacctaccagttagactctgcatcactctttatgccgggcaatagtattacctctgcattagccaacgaatttgccgaagcagaaacaggtcttcataccgctgcattaatggaattaggtctgattttatttgtcattacctttatcgtccttgcgatttctaagtttatgacactacgtttatctaagaatgaaggagcacgttaagatggctaaaacatcctcttcttcattacaagttcaaacagaaaaagaactgcatatacgccataaacgccaactttggcgtcgtcaaaaaaaccgtatcgcactgtttttatctgtctctaccatggcatttggtctgttctggttaatgtggatcttgttttctacagtaaccaaaggctttgatggcatgtcttgggccttattcacagaaatgacaccgccccctaacaccgatggtggcggattagctaacgccattgtgggtagtggtctacttattttatgggcgacggtcattggtactcctttggggatcttagcgggtatctaccttgctgagtatgggcgtcgttcatggttagcggaagtcatacgctttatcaacgatattttattatcagccccatcgattgttgttggactgtttgtgtataccattgtggtggcacaaatgcagcacttctctggttgggcgggtattgtggcattagcgttattacaaatacctattgttattcgcaccacggaaaatatgttgaagttagtccctgatagcttacgggaagcggcttatgcattagggacgcccaagtggaagatgatcgctaaaatcacgttaaaagcctccgtatcgggtattatcacgggcgtattattagcgattgcgcgtattgcgggtgaaacagcaccactgctatttacttcactatctaaccaattctggagcacagatctaaacgaaccgatagccaacttacctgtgactatctttaaattcgccatgagccctttctcacaatggcaagagcttgcttgggctggcgtattactgatcaccctctgtgttctatttatcaatattatcgcgcgcgtgctgtttgctaaaaataagcatggctaacgcagaaagttaagcaagagagaacgttgaatgactatggctaatgataacgctggaaacaaaatccaagttcgtgacttgaacttctactatggtaagttccatgcgctgaaaaatatctcattagatattgccaaaaataaagtaacggcatttatcggcccttctggctgtggtaaatccactttactgcgtacttttaataaaatgtatgagctttatggcgaacagcgtgctgaaggtgaaatcttgttagatggcaacaatattctgacagataagcaagatattgcgctattacgcgcaaaagtaggcatggtattccaaaaacctacaccatttccaatgtcgatttatgacaatatcgcttttggtgtacgcttatttgaaaaactgtctcgcgctgaaatggacgaacgcgttcagtgggcgctgaccaaagccgcattatggaatgaaaccaaagataaattacatcaaagtggctatagtctttctgggggacagcagcaacgtttatgtatcgcacgcggtattgctatccgtcctgaagtattattactggatgagccatgctctgcactcgatcctatctctacaggtcgtattgaagagcttatcagtgaactaaaatccgaatataccgtggtgatcgtcacccacaatatgcagcaagctgcacgttgttctgattacactgcatttatgtatttgggtgaattaatcgagttcagtgatacggatacattatttactcgtccagcgaagaagcaaactgaagattacatcactgggcgttatggctgataacgaggcaaatcatggataatttaaaccacaataaacatatttctggtcaatttaacgctgagttagagcatatccgtacagaactgatggtcatgggtggcttagttgaagagcaattaaaaaaagccattaccgcaatgcataaccaagaccaagcattagccaatgaagtgattgaaggtgatcaaaaagtcaatatgatggaggttgccattgatgatgcctgtatgcgtatcattgccaaacgtcagcccaccgccagtgatttacgccttattatggcgatttctaaaactatcgccgaattagagcgtattggtgatgtggcagaaaaaatctgtaaaacggcccttgagaaattttcacatcaacatcaaccactgctagtaagtttagagtccttaggccaacatgcgatacaaatgctccatgatgttcttgatgctttcgctcgtatggacttagaagaagctattcgagtctatcgtgaagatgcaaaaattgataacgaatatgaaggtattgttcgtcaattaatgacttatatgatggaagatcctcgcactatcccgagcgtactgacggcattattctgtgctcgttctatcgaacgtattggcgatcgttgccagaatatctgtgagtttatcttctactacgtcaagggtcatgacttccgtcatttagggggtgaccaagtagaaagaatgctgacaaaaaatgatgatagtcattctgctaattaaataatttattcactctctttacgctctgaaacagaggcattatttgcctctgtttttttatttatgtttataaagtcactatctctccttaacttattctataaaagcatatccatatcattttttattattttatgaacttagaacaacttgatagcgtgataggcaacataacaatgagaatactttttttggggtgaataatgaaattacgtgttttggcaacggcattaattgctggctcagtgcttttttctggtctggcaaaagccgataaattagacgatataaaacaggcaggtgtggtacgcattgctatttttgatagtaacccaccgtttggttttatcgatccacaaaccaaaaaattggcaggttatgatgcagatattgcgaatgaaattgccaaagatctcggggtaaaattggaattacgtccaactaacccagctaaccgtattccactacttagcgccaaaaaagtcgatttaattgccgccaacttcaccattaccgaagagcgagcaaaacaagtcgatttctctgtaccttattttgctactggacagaaatttatcgcgcgcaaaggcgtattaaccagccctgagcaaattgcgtcattacgcattggggctgacaaaggcaccgtacaggaaattaccttacgtgaacgctatcctgaaactaaagtcatctcctatgacgatacccctcttgcgtttgccgcattacgcaatggcaatgtacaagcgataacccaagatgatgctaaattagtagggttattagctaatttacctgagaaaatcaaagctgattttgaaatatcgccctttagtattacacgagaatatcaagccgttgccgcagctaaaggtgaacagcgtttaattaacgagattaataacacgctattaagattagagaaagaaggcaaagcagacgaaatttataatcgttggtttggccctgatactaagtccgctcaacctcgtggtgactttaagtttgccccactttctgagcaagcgcctcaatcctaatggtagagcaaataacgacttaatttatcgcgatgatttattgataaaacaccaaccccgctactgcggggtttggcgtctgcaataggtaataattatgtttgcgcagtttctttctcactatcttcttgagcctcactacttaagttggctgtggcaaggttttttaatcaccttgcttatctctttctggactatcattattgccacattactaggttttcttctcagtgctgcctatgatagccatatcgcgccattacgttggtgtgcggccatttatacttcactctttcgtaataccccattattggttcagctcttcttttggtattttgcttctggtgaactattgccacaaacggccatgatatggcttaacaccccacatgaactttctttatttggcttaacgctctcttggccctcttttgaatttttagccggtattattgggcttaccttttactctgtaccttttattgcccaagagctaagagcaggaatacagggagtcagacaaggccaaaaatatgcagctttagcgttaggattaacccactggcaatccatgcgttatgtcattttaccgcaagcttttcgtatcgcccttccgccattgttgggtcaatatatgaatattatcaaaaactcctctctcactatggccataggtgtcgcagagctttcttatgcttcaaggcaagttgaaactgaatcattacgtacttttgaagcgttcggcgtcgccaccatactgtatatcgctgccattgcattaatggaagcttgggggcaatggcatcagcaacgaaaattagcgcaaggatattaatatggactttactgttattgctgataattggcagtatctactttttggcgcgtatcctgatgggccattagaaggtgcggctttaactatatttattagtgtgatcgccggtattgtatctattatattagggacgcttggggggatcgctctcgccatgcttaaaggggtatgggttaacttatttgccgcttttttaggttttttccgtgctattccggtcattatgttgattttttggctctattttctattacccgtggtattaggaatggaaattcctgagataaccaccgtgatctgtgctctagcacttattacctcctcttatatcgctcatggtgttaaagccggtattctcgctattggcaaagggcaatggcaagcaggtttatcgttaggatttaatcgctggcagacgctttggtatatcgtgttaccacaagcattacgtatgatggtgccctcttttatcaatcaatggatagccttaattaaagatacttccctcgcttatgttgtaggtgtcggtgaactctcattcttagcaacacaagttaataatcgcagcatggtgtacccgatggaagtttttttatttgttgcctttatttactttgtgctctgtttttcattagagttaattgccaaccgagtggggaaattatttaccacccaaaaagaaaaacgctctttttggcaatatgttatccctaataaaaaaccttcactgagtgaaaaaattatttaacttattcatcccctaataatattgattaggggattaaataataaccatcacaatgtcttactccttaaaattttttagtgcttttaaacgtaagatcatatcaaatgctaatataaattcctgatagagtttatttctccgctcaataaaatagagataaataactaaagataaactcaccgaataaattaaaaagaaattctcttttatattcagcaaatagaataataaacagagtaacaatgtacctaaagggatcaaaatcagaaaccataatacacggcaaaacaggcctcttttttttacctcagcaaaatcttcttcaaagctataacagataatcatccccattaggtaattaattttactcgccttcgataaaaaaagcataacaaacagaacactatataaaagaatgattaatgcaacaataaactcaatattaagataaccttgctctaacgagaaagtagcactgttctggagcggaaaaacaataggaaaattaacaagtaaacttaaaaaaacctcattaacaataatataggatatgttaaattttttcttctcacggctatataaagaaaagttattcaaataatgaattgaacaactgacataaaacttgatcaaaaaatacataaaaaaccatatcattaatggtgacaagaaaaaaccaagaaaaataataatatatatttggctatcaaaaacaatctcgattaaataagaggtaacaagaaatattattataaccccaattatatagcttaacgaaaaaacagtaaaataacgtgatattatcgtcctttttatatcgcttttattattattttttaaataaaacttttcagaaaaaatacagtatcgccaatatattcgctcattcatcattgcactgagtaaaatgacaataaaaatagcaaagttacccataaataataaccaaaaacttaactcattataattattaataaagcataaacttaatactatcgaggcgatataaataggtgttagcatagtatgatgatgcgcttgcatataataatgataattaggcaacataattgctcctatataagataattaaatataatcattaacatgcaatatatttttatcttttagcgtatgtgaatttttcgctaaataatacaatgacttgctatcaccaagttcaataaaattgtgatagcctaaatgacaccatagcgccatagttgctgtccatcttacggtttctgtgagttgattaactaaattctgtttaattgtctcaatatcgctaacaatctcagcagaaacattcatcactaggggtttatctgggattgaaaaagggattgtctgtaaaaagtgagcaagtaaatttttcccttcgctcatcaattcagtgtgccaagcaccattaacggctaatttattcgtttctattttcatattagctaattgattaacaaccttacgtacacttgcatactcccccccaataacttggtgaagttcactgttatcacagcaaatattcacctttgttgcgagatcttgctggtcaatcaatgttgataacgtctgataagagcaatttttaacaacatacattacccctttgttattcttagcgagctgttgcatgatagatgcgcgataactaattaacttaaagacagattcaagttccagtacgttcgccgcaaataacgctgaatattctccagcgctgtgccctgaataacccgcctcattcacacaacaatgctcacgcagtaaataaagagaagcaatattgatagttgttaacgccacttgctgataacaggtttgtaccaatttattcatgggcccttttaaacaaacagtccttacatcgaaccctgctatttcactcgcacaattccatacttcttttattgatggaacgtcacgatataccctatttcccatacctaaataaggcctaccctgacctggaaaaaataaaatgctctcttgattttggtgatactttttctctctcaatggcatagaccatactcctaaatagtaatattatttttttgatatttttgtaaatagtggctaactttaaaaatagagatacacgaagcgattgttgcggaaaaaaataataatagagggattttaaacatagcatcatattgccatagccaagggagcattaatgaatagctattattatcagataaagaaatattgatttgtttcaaattaatcaaccaagataataactgatgaattaataatatcgttatagaaattgttatagtcataaaaatagccaataaaataaataatcgagaaaaactacctcgccaaatacctaatcgattaaattcgaacagatcaccaatagcttttttgatagtgatgataatgattttattcactaaaaaataataataaatagcaataatgctatacaataatagcattgaccacttaaagaatgtcacaatagaaataatataactttgtctctcaataacagggatcacttgcaaatttaaagatttttctttattaatccttgttattttagctattacgctattcatatcatgcacattttttaatagaatatttatttttgagacacttttacttttttttatatattgtagtgtttctaatggaattttgatcatggcataaggataactatttatttgtgtgttaaaaataccacgtacataagttggtaataccattttttcattattatgaataaatacaacattaactaaatccccatagtttatatttatagcatcagcaataaacttatctatcgtgatctcagttcttctgacatgagacaattcactccctgaaacagttagatcgtatgctcctatagttaataatgacttaggctcgatagctaggccagaaaacaatactgcttttttattgataacattttctatcatgcctgaaaaaataatttgtggtgaaatgacctgaattttttctaataactgcttatcataagttaataaatggatgatttcttcagcattggttatttccaaataatctttcttatcagtaatatcctgtttattatcttttttataaatttcgatatgccctaaattggaatatgctacttgctctttgagcagtagcgtgaggtgatgataaaaaccctccaaaatcgagatggcgacacagagtaaaacgataaaacataaatttcgataaaaatggctaagggttatataaagtaaccctaatgtgtatttgatataaaaccaagataatgaactagaaagtaatactatcaaaataaatattgagatgaatataataatattttccattaatcactctctaatgttattggttgaataaccgcggtcttttcaatagataaccaaggaggaacgctagtgaaactatatcgagcaatttttttactcgcctcattttcttgaagtaattgagccatgatcttttttgcttgtgtcacttgctcacaactaaataatgcacgcgcatacatatagttaatcatgggtataagttcactattgatattaatattctcaagtaattgctgactgtcttttttagccaccacacagcgccctaaataacgaggtgtaaaagcatccattcttaatcttagatagatcaaccgccaattagttggattttgttcaacaacttcatcaagataaaaaaaggccttttttattgtctgtgcagcctgagaataagctttatttttatgataataagcggataaaaatacactgacataaccataaatgactttatcaaatggataatcaccttgttttatactgtattctaactctgaaattaatgaggtcaatttatcactggcagtaaatgtattcagtgatataaataataaaaaacgtttatcactatttttaatgtctattttactctctacttgcgagagcaatagagaaattattattaaaataataccgatacaattaagttttctccccatcatataactctccatgtttaagcgttataattttatctacagtcatgtttagatgattacaattagtgattaataatattggtatagataaatctttatgtacttgtgataataattggataaaataatcaaagttattctgactgaaacaatcattattataattagcaatgatacacttaggttttttcactaaagctctgctaaaggccacctttagcaattgatctgttgataacgattttggggttttattatagagtttttctatgcccatagatttaagtgtatttataatattattctttagcttttttttatctttatgatcgactactgaataataaatattgtcaaatacattacaatgattaaaaaagtaattttctttgaaaacaaaaccgatcattctattccttaataaagctcgctgcttttcatctagaatatttatataattacctaaaaaataagtataaccagcatattgaatatcaactcctgaaataatatcaatcaatgcattcttttcattctcttgttgatattttattaatgtaaaatgctcattattaatatcgaatgtgagatttttaaaaattatttcagcgttacttttatcatgattaaatttattaatatttgttagtgaaaatagtgctaattggcgtgcttttgttattccatacataaaataccttattattgtttccaacaatcaaccagccaaacaccattttctccatcaaacgcactcaaaaggtaatgagaggcactatctgctgctttttgtaaatgatcgaacataagagccggtgtgataaacccactatcaccataaagacgatttaaaaaatagcaattaagattaacaggtaacgctgtgaatgcggtttcaagtatagaaatatatttataagtcagtaacgcagttatataaattgaacccgtctgtttattaatacaacggtgccaatttttaactaattgctttattgccttttttctattttgactcatagaaaaataatgattgataaaaatcgaaatatctgaacactgttttttattgataatgatgcaggcgactctttcaatactatttatattttccaatgtattaggcttgaaaaaaagggttatcggttgtctttctatttcactaaaagataaaattggtacagcccgaaaaccaccacaaataaatatattatcaagtaaatcactattaatgagcttttgtgctaataatagtgccgacatcataccattacgttcgcctcttattttgcaagagaaattttttatactgtatttttttatgatatttctaggaataatattaagagtaaacacatcccttaaactatctatctgttcgaaagccgttagctctccccatgcatcaatataaatcagtccatttcgctctttttttaagaggaattgtgattttgtatctaattgaccaacagcatgatcgaccacatgctctattgcagataggtaaggacgacaatttgtttttcttattccttcacgtagatacatatcatgattgaccccatagcgttgaaaactccaactttttcctgcgctttttttacccgctaaacgtaacatatgagattcccatacgttataccatgaaggaataaaagggatcagtggctcctgtggctcaaaaaaagcataagcggctaaattaatagcaccagtgggtaataatcgcctcatccttgctctccatttgcgattaataacatggcaataatagagccatccatacctaagccgatttttaaaataggtttagcgctatagttcacacactcttgattagtgaggaaattaacctccattccatcatctattggataatgtgtagttgaggggatcaatcgattattttttaatgaatcagctataatcattaaatcaataataccagagcaattagaaatataacctatctgccctttatagctaataataggaatgggttgtttaaagatgttagtaatagctaccgtctcagctttatcactaataatcgaaccattaccatgaataaaaatagcaccaatatcacttggtaaataatgactaagatcgagaagctgagaaatcacttttgatatcgtataaaagttaaataatgtgcctcccattgtccgttcagcattactttgcataaaaacggaatgatagatataagcaggtgcaagatattgtctcgagtttatctgttgttggctttctaaaatcatcacggcataaccatctgataaggtgaccccatcactgtatttactcaaaggttgagcgtgcgcttcaactaacatgccttggctatccataaaggctatatcttgtaaaagtaagctattccacgacaatactattacaatatccgccatatcttggcttatttcattatgtcctatatgcacagccattaacgcagaattactagcacaatagataggaataggtgggaaatctaactgatattcagcccacaatttattcgctaattcatcctgtgcaaaagaggctgcatggagtgattttatctgcggagaatattgaacatcttcggcatcgtttttatcataaaacccttggtaatccataaaatcggctctaggcccgtgacctgcaagatacattatggtacgtgaagcgcgaagcttttctagggtgatattagcccgttttaaactgttatgaattaatcgcgttaatatttcaaaatgatcattgggaatattttgataggggatcaccgccggattatgattaaatttaaaatattctacaaaataatcatcagagaagtatttctctgttttaattgttctttttaataaaagttgttcagaaagttgttcaaaatttactattgaaggtaaattaagttcccatccacttatcgcaacatttttcataacggtttcctgatgataattgcatagtggttacatccttctgatgaaccaagaactaaagcagtttctatctgcttattaatcggttgggtaacaaaatgaatatcatcagctataaaactttttgtataaggaataggtattatcgtgttgctttccatcatatgaatcactaaagagatcgccaatatcccagcgcatgattcaactaaaccaaaaaaggcattgtaattaactactggtacatgatttgccgcttgataaaatagttgccgaatcgcacggatttcaacttcatcattctctttattaccatcactggtaccacagataatatcaatatcttggcaactgagttgcgcctcagataatgcttgttggatagccttacataaggcggccactctatcagtaatattttcgtcttctaaaaaagtattatcattagctttaccgtagccaataatttcagcataaattttagcgcctcgttgcttggcatactctttatcttcaagaaataacatccctgccccttctccggggatatagccggcacttgcattagaataaacctgataatctgtcgcattcttggtcagattaactttcttactcatcgcttgaaaatagagtgaaatagaactgaagtgctcatctgcccctccgacaattacctgaggttgtagatcttgcctgataatttcataaccataagttaacgctcctaatgcagcattaacccctgttgccaatgtcgtggtataaccttttattccctctgtgatggcacaaaatgtcggtactgcattcattaaagtaccaggaaattctgatgttcttactttttgcggatcaggaattaaactttttaaataacgattaacggtactttgtggcccttttgacattccaacaataaaacctaagttatcaccatcacgtttaattttgcgtccagcattagcaagtgcttcatttaaagcgaataaggcataagtcccgctaggaatagcttttcttggatcataataacgtaatgtttttttcggattaacgtcagtgatagcatgataacaggcgttattttttaagcgatgatcaatgtcgagatcaaaataaggatgtcctaacgattgctcaaaatcattatcttttatgacaacagacatcaagttgtcgatatctttctgcacatcactcgcaaatacaataggttttaatgtacctgttttatctcctgccaaaatcgctgttattatctccattatattattgccaatagacgtaatcgcccccaccccggtaataaccacttttttagctttatattccgtcggtgttttatctgtaatataagggcttgcgataatagagcagttatttcctccaaaagcataattatttttcataaaaaattttacttttttatcttgaaagaaattcggtacataatttaaatcacagctatgccttggctgagtgaaatttaatgtagggggaagtttgtcttctgctaaacaaataaaacacgcgatgatttcaacaatacccgcagcaccaatattatgaccaacataagattttgttgaacttaatgggatatgataaatattaggaaacacttttttcatcgacatggtttcaatgcgatcatttgcttcagtacctgtaccatgcacatttatgtaatcaatatcattaggggtaatacccgcattatccagtgctttatacataacttgcactgcaccatttcctcgaggatcagggctagtttcatggtaagcatcacaagatgtcgcataagagacaatttcaccatatattgtcgcaccacgttcaaccgcatgttgataatcttctaatactaacgccccagcaccttcaccaatagacataccaggagtacctgaaaatggggaagttggtgttgttttcatcacattaagggcataaaaacccgcaaaggtaggaagataaatgggttctgttccgaccgctagcacaacaggatttttgccattttggatataatcataccccatacctatcgcgttagggcttgcggtacaggccgtcgccactaattcaagaccaccacgtaagccaagtagacttgatacactcgaacaacatgatgaaaatccaccggataaaatggctttttttatcgaaaaatcatcaatatgttgttcaaataatggcagaaaggcttccgttcctgccgaagagacgcccacgatcatcgcggtattatctaaaatagactgattatctattaagtttgcttgttgtaatgcctcattgcagactcgatatgcccataatgccgcattgtctagtgatcgagcgatatgctgcggtatatctgaataatctaatgccatctcaatctcagatgcattggcatttttaaaccattttaaatagcgttggcttggcttaatattacattgtctattaaaaagaacctgtttaaattgaggcacatctttagctaaagatgataaaacccccattccggttattacaacccgacggcgtctactattcatgttaattcctatataatatttattatgtttaataaatatctttgctataaatttaatctttcattattgatgtctttcaagataactatcttcggttggattaattattaaacttaaattattaacaaagggaatactcgttgtgataaaatcaatatcaccataagccgtttttattttatagtcatcaatatcaacataagcaaattctcgttttaataatattctagcaatatgttcttttaatataaaagagtatcccacttgaataactacgcctatttgttcattttggtaatagattgcatcgccttgtaaaattgcagcattctgaggcatattaattattcttgcgccaactattttctgatctaccccattatcagcacgttgttttattgcatcttgaccaataaatacatctttatcgtaactaatcgcccattgcatctgtaactcaataggacagcgactaaaaggattaatcacttgaggctcccaacaagggttttctagtcgtatattttttaaatcatcaaccccgccaatctttaaatcaaatttctcagataaagtgcataaatgtcgccaaatagacattaacttctcttcatctcccataatgtgataacaatattcaccgtgtttaccaacacgcatagtaatgacatcttcatcaacatacataaactcatgaaaaggtaatccaataatatccataccgacgatttcagataaaatttcccaagcataggggccttctagacagatcatacgccaatctggagtaagagaagcgatagcatcaatttggtagcattcaccccgttcatcttgcttatctaatactttttttatctgctggcatatggcatcactattcatccactctgaaattaaaaaatagtgttcattatcacatagtacataggcatcacttattattttccctgctttatctagtaacaatgtataaagtagttgttcatcacgaatagatgaaatgtctgcagaaataagataattgagtaaccgccaagcatcttcaccagaaattttcaccatgccataatgagaaaagtctgtcattaatatgctatttcttaccgaaaaataagcctcatgttcattagtataacgtttgggaagtgtcactccattatattcaccgaataatacattcgctttattttccatttcaaagtatttcataacatctccaataaataaaaatgatataaattaattattattgctctcatttttttcttgtttttctcgctgtttatttaaaataaatgttgttaggctatttattgttctcatataagaaggatcatcaccttctgttacttgaatattaaattcatcattaagaaagacaattatctcagtggcatcaacagaatctaattttaaaccactaccaaataatggagtatcatcatctatttgattaatactcttatttaaattgagtcgttcaataagcccttctttgactcgctttaacattttttttctttgttcaattttttcatttaacttatcgtcattttccatactattaatatcctaatttttattttgttcagagtgattatattctctgaaattaactatggtgccattagcaatgattttctttcccactcttgcctcaacagaatagtgtttaaaattgcttttatcagaaaataatagaatgcttgttatctctatggtatcccctgggtaagcagcatttttataccttaaattttgtgaggccaatacaccggaaacctttcttcgatgctgaattaaaattcgttctgatctcggctcattaagggctttggctatttctttaaatgtagttaattcaatattgtgttctattttataaattgaacaaaagtcatcaataaaagataaatactcacttgtttgaccaaagatttccgccaccataacccctggcataacaggatcggttggaaaatgtcctaataaatagggatcattaaaggtgacatgtttaatcgttttgataataggtttttcactagggacaaaatcgacaatcctatcaaccataatggtcggttgtcgccatgcacctaattttaaaaatagtgtaggaggcaataacgattgattatagagactcataagggttacctctcatcgcatcaccatcccaccatcaacaattaatgtttgcccaacaatatagctcgatgcctcggagcttaaaaatacaatggtattggcaacttcagcacttgctcccaatcgttgtaatggaataaccgatttaatatgacgtacgacttggcgtgacacttttttgaccatgtcagactcaatcatacccggtgccaccgcattgactcgaattcctttacctgccaactctgcagccaacgtatgagtaaaacctataattccagccttagcggcgctatagttactttgcccaatacttggaacaatccctgcaatagaagcaacattaataatggtcgctttttctgccgatcttaataaaagcaataactgtttagtaaattgacaagttcctaataaattggttttaataacatattcaaattcacttatatttatagcagaaaataattcatctttaatcacacctgcattgttgattaatatatgaatagcattagcatatgcctttagtttatctaaaaaatcatgaattgatttatcattattgatatcacattgtaatatatgtaagcgctgacaatattcactctctttttttagcttatctaagttatttctattttggtgatataatgcataaacatgacactgctgttcaaggtatttctggcaaattgcaatacctatatcaccattagctcctgtaacaatcacattcttattctttagatcagaatatataaacataataaaacacctataaaagcatcaattaaaaattgcaacagcgacagcataatgatcacaatgagaaatacttaataatgattgggttatttttttctgctttaataaattagaaaaatggcctgtaaaaaaataacaaggtgcgccatattcatcatgccttatttcaatatcatgaaataaaatccccaaacgaaatcctgtacctattgcttttacagcggcttctttagcagcccaaaaccctgcaacacgatgataattttcatgaattctaccgatactgtttctttcatattcagttaataatcgctgagttaacggttcaccacttctacatattgcaatagccaccttttttatttctataatatcagttcctattcccatattatttcatactcaagatggtgtatcctttgatctatgagcgacaaaatatcgctcatagataggctaaaatgttatttatttaacggcccgacaactttacctttattagtaaaagtgcctttattatcgatagtaatactttctctaccaacaataatacctgatttttcattagtaatattctcaccagaaatagtcgtgtcttttattgaattaagaataccgcgattaataatatttcctgtcacacctaattcgaaactatttttacctgacataatactattgctggcattggtatatttaccatttatatttacacgtaaatgttctacaccagaaatgacgccattgttttcaaaatcacgattaaccgtcacttcagtatcaccactcgacgcaataacaccttttaaggtattactttcaaccgaacctgtactgttatttttcagtgtatcggtttgtagtgttaatttatcctggccaaacaatgtgccttgtgaattggtaaaggtgcttgtcactacaaaggcatttttatgtgatgcaatagtaccactggtattatcaacagaggtgaatttaagctccatatccccattttctgttacaatacgtcctttattactcactaatttattaccgcttaatttcatttctcctttactaattaatccccctttctgatcaggttgccccagataaaagcccatttctgttttgaaatctaaactgctgttattcgtcagttctggtgtatcaatctctaatttctgttcagtgatcacaaatcctgatgtgttattaaatttatctgttttaaaataaatagcgtctcctttaataacacctttattattatttatataaggcgcactgatggtaacgctatcgccttctaagtaaaaaacaccaaagttattatctaatgtctgggagaaagtcacattagcaccagttttagatgctaagccaccatagaggtttttgatcttatcactactaaatgtcaagtatccccctgattttatatgtccccatttattggtaatgtcgcctttgttagtgaagttcatatcgccatcggtggcaataatcccttggtcattattcagtccagcaatattaactgtcataccatccagaccactaagaatacctaatgaatcatcgctagcagtatctgcagtcatgccggtatttttcagcgccttaccattagtatcaatttcaacacgagtaactgagcgtaggcggctatgggtattattcattgcgccactattaatactaatatcccctgatgcatcaatataagcatcaatattattgaaatcttttaggttagtattaatatcaatgacacttttagaattgatttgaccctctttattattaaataagccactattaatcttaataccattagtagcagaaataccgacgccttcaccgaccgttgcagtattcgttattggtttaccgtttgtctgaatatctaatttatctttacttgcaatataggaggcattgtttttaaattcaccactattgatagttacatttccatcagcagaaatattaccaccagagatattatcaactttcgcttctttggtttctattgagatagttttagtactttgtatttcaccagtactatttgtaacacctttatcgaaagcaaaatagatatccccctcagataagaagttacctttattattatcaagtgcaccgctatgaataagctcgatccctcccccagcagtttcaacattaccattatttttcagtggtgagttagcttcagtacctataaattttaacgatgagcttctcactcctgcattcttgactatctgcaaactatatttactagcaacgcctgttggcttttgtgcaaccacagtattatcttgtgctttaacttcattagcgccagttatcacattcacattaataccagatgcatcaagaggcgtttcaatggaaacattgcgggcaattaaatcaatctgttgcgcacttttatcaaaagtggcattacctttaacagtaatattccctttttccactttataactatcaacggtatcattttgtgtattcactttcccagtagtcaacacaacacggtcagcactaagaaagttacagctactacaaataattccagcaggattagataaaataacccgtgcttttgttccggccacctcaacaggaccatttaacgtaatggcttttttagcgttaacctcaagagtaatctcttttgccgcaccgctagataaattactattaccgtcaatatgccccgataattgagtatcagcaccatcaggactattatttaatattaaccctgcttcagaaacatcaaaactggttaatgaattactggaatagccattaatcgctgcggcaatattaagaatatcaacactactatttttttgctgttgttgcacaacaatatgagcagacggatccgcctgtactacagtcgccatatttaacgttgataatacagagaaaactaataaattaattttaaaagaaacaatttttttcctattcattataattaccttatattaagcacaaaagttaattaaataataagatctctctttatttaaaagatctattaagcactaacaggtgacaaataaaatataaaacaaaaaatcgattgaaatttactggtgagttaactttagagaaatatatttatttggcaataggaaagcatattcataattaattagatcccgaactaaataaaatgaaaacaatataaataattactctgataaaaataataccaatagagatatcattttatttctaataacaagcattattactataggtattaatgcttaattaaaacctatacctcctttatctctacaacactttttcgtgatatgttcgtcttaaaacgcaatcgattactttttaggtgcagtttctaatttatttgtgtaggataaagcgaaaaacatttttttttgggatcttttgtctatgagcatgtcatcaccaaattctgctccgcagagtttgctccaacgcctgtttaaacttcaggaacacggcaccacggttcgcacagaactgatcgccggtgtcaccacctttttaaccatggtttacattatctttgttaacccacaaattcttgctgcagcccatatggatattaaagcagtgtttgttactacctgcttaattgccgcgttcggtagtattttaatgggactggtggctaatctacctatcgccgtcgcacccgcgatgggtctaaatgccttttttgcctttgtcgtagtaggagcgatggggtattcatggcaagtggccatgggcgctattttttggggcgcagtaggtctctttttgcttactctctttcgtatacgctattggataatagcgcatattccgcttagtttacgtgttgggatcaccagcggtatcggtctgtttattgccatgatgggcctaaaaaactctgggatcattattcctaacaacgacaccattgtgactatcggtaattttgcctcccacaatgtgttattaggtgctctaggcttttttattatcgccatccttgcggctcgtaatattcatgcggcaatcttaatatcgattattatcactacggttattggcctgttattaggggatgttcaatatcaaggtatctttgatattcccccatctattgctcccgttgtagggcaggttgatattgttggcgcattagatattggcttgtctggggttatctttgcttttatgttggttaacttatttgactcatccggtacattaattggtgtcaccgataaggcgggtttaacagacgataaaggtaaattcccacggatgaaacaagcgctctatgtagatagtttaagttctgtcgcaggctccgccatggggacatcatctgttaccgcatttattgaaagtacctcgggtgtttctgttggtggtcgtaccggattaactgcagttgtggtcggtattcttttcttactcgccattttcttatcaccactggctggaatggtgccaagctacgctaccgcaggggcattaatttacgtcggggtgctgatgacctccagcttaacgcgcgtaaaatgggatgatttaactgaatccgtaccagcgtttattaccgccgtgatgatgccatttagcttttctatcaccgaaggtatcgcccttggctttatcgcctattgtgtgatgaaagtgggtactctacgctggaaagaaattaatctctgtgtggtgatcgtttcactgttatttattctaaaaatattattaattgatactcatgttattgatttaaataatttattttaatatttaataaattaatttattaataataaaaaaagcaccaataatattcatcactggtgctttttattatcttaaattacttgatataagttggtagcaacaaaccaaaaatagcggaatcagacacttcatcaccaacaatccagcgttgctttaaatagccttcttgctcaaaaccaagcttggttaataatgccctagaggcttggttatcgggatgtatatccgcttctaaacggcgtattgatagatgtgttcttaaataatcaataaaagcaatcattgcctcatacatcaacccttttccttgaaaggcgttatcaagacaataaccaatttcaccacggcaagaatggagatgatgattgaagaatacacacatgccaataagtttatctgttgctttatcaataatggctaaacgcagatattccttacgctccatatgcgtaatatcctgaataatatcttccttcgcttgttgtatattttgccaaggaagatggctccaataacgagtaacctcaggagagctcataatctggaaccactcttgagcatccttcatagcaaaagagcgtaataataatcgctctgtttcaatacgaatatcagcataacgcattttacaacttctctgattgctgtttaggcgagacaaaagcgatacataccggctctgccagtgcatcgggctcagagcgaaacatgacttcttgagtatctgctatttttaaactcggccaatattgtaatcccgcatcgaaatgggctttatcacagtaataccccaccgggccaatcaataagacacctttgtcctctaattgcgccaacgtaatatgacggttataaatattagggggctgaacatctttctcgacaatccagggttgggctgatagcggtctatctttgccataaaaagtgatccactcatgcatatactcaccccctacataagataaaggctgatgataatgctgatgccaagcattctcgacatcttgtacaaaggttttaacaccaataaacttttgacccgcattacgcacattagcagcttgtaccaccgtataaccagataccactaacataccaaaaaccgctaaaccatataacacaccacgtaatgaacgcttaggtatgacgctaattgagccgacaaaaagagcagtagccactgacataaaaggttgtaaccactcagtgatacgtcccccttcatggaaactaaaccaaataaaaataatcgctaatgggaatagcaaaataaaattcaataattgactatcttgagaagtacgccaactaactcgcccaccataaagacgtacaattccccacattagcagcactggatagaaaaccgttaaagcggcacgtaacgtacgtaaattaaaacgtgcttctatttgtgagtcgacccatttaaaggcggcaaagtcgttttgccacaaccaaataaaattaggtatgacaaacgccaaccagatagctatcgcaaagtaaaaataaggggagcgataactttgacgaactttaggtactaatacgcttaataagaataccgcaccaatcagggctaatgaggagtatttccccatagtagccacccccatcactgcagcgaatccacaccaatatttggggttgtcattgatagcgcataaaaagaaatagagcgcccaaggccagcaacccactaaaatataattatcgttataaggaatgatatcgaaattaataattcctgataaatttaaacctaacatggcaaaccaagctaggtgataatttttggttaacttataggctaaattccaaacacctaataagccgatggctatcatcacaaagtggataaaataccaataaaagctaaaatcaataccaccataaatggctggccacataataaaaccaacaaaccaagggtttttaggtgagccccaaccgccattagtaccccagttaaccgcttctacggcatcataaggtacggtgggatcaaataaatagctgacgataatccataaaaccgcataaccaattatccaccaataaactggtttgcgtaatcgagcaaatgataatgtcataataaacagaatgttaagttaattagtttaaatttatagttaattgctatcacaatacagtaaagtatagtaaaccgagcgctacattgtacgtgagtaaatattaaattgtcttaaattcgtgcttttatcgcaaaatagtttctgatagattgcgcaaccaataagatcacaaatcgagttaccattatgaatatgattaaaagaaaacccgcagctaaaacgcgtaaaaaaacacgtgaagagctaaatgcagaaggacgtgaacgtaagcgccagaaaaagcatcgtggcaatcctgctggtaaccgtcagcaggaagcgatgaaaaaagagcaagcgcaaaccaatgaacagaaagatccacgtattggtagtaaaaaaccaattccactcatcgtggataatcaggcgcctaaagtagataagaaaaaatccgcgccaacaaaaatggagcctatgcgcttatcgttagaagaagagttagcactcttagagaatgatactcgtttagatgaattactctctcgtctggaagaagggggtaaactcaatcctgaagagcaagcttatactgaaaaaacccttgatcgcatcgatgcgttaatggcggaattaggcattgagtttgaagaagatgacgatgaagaaaaaacagaagatattatgcagttattaaaaggtaagtaatttatcgttaccctatcttaatctgacagataccaaatatatattggtatctgttcatttcctttctctctattttagagagtcataattagaaattatgattttttatttaaatttattttttaaataaaagctcagacaactctatctatttcttattaattaaccctgatattctatttttcttcttttaatatacgagtaataataagtatggataataaacaacactatttagatatcgccgcagggcaaggaaaaaaagagccctctcgtatagtggcattccctgcacagccactaaactatgcattgatagaacaacgcctagaggaacagaccgaatacacagatggtgagataagctatcttagtgatgatcttgatgaaggttttttctatcattgccaacatggcgatgatgagctccatttttttatctgcctgctaccacgatcagaagattatcaaatacgtcctatgtatgcgacagatgagatgactcctgagctattagcccatgccaatgccaccactcaagacatcttattagaaacgatgttctctgacaccctacatcctttagcgagttatcgccatcagctcaatctactgaacataattgcgccagaaatgatcctcgcactggatgaatctgccgcaggtaaaggattaactcccgaatggatacgctttcaattggagacacccgatctctatcctgaagtagaaagtttgtatgttattcatgcagtttacgatacagaaaatgatccaccaaccatgttctggtttcatacccatggcttgcaacgttgtggcttaactgaagttgatttagtgatcccaagcatgttggaatcttactacggtattcctgatcttttccgttgcttcgtcaataacagtattaacaaccgccaaattgaatttggcgagccgatgctttgtggacaaacttcgtcaggattagaatatttagtcgcgctaccctttgaagaaggtatacgtcacgttaatcagtccacacctttagatagtcttagaccattagaagagatgcgttataacactcaaggggcaccacatggcgtatttctgggcgatatggctgatagagacgaatatcatcagcacccatcatcgatgttatttagaactaatgaagaaaaccctattttagaaactttctttaaaggttatgaagaacaacaagccatgatgctactacgcagtaacgaagaaacctacgaaatggcagaaaaggccaaaaggcgttggcaatattttctctccatgtttgataactaccatcagccccccgtagagaaaaaaaccggtttcttggcaaaattattaggtagtaaagagagcaatgaagaaactgagagcccatggcaatttatgattaagtttggtattccttatggtgataaggaagaaaaagagcttgagcacatgtggtttatccctcagtctcgagaaggtgaccgaatttatgctaagttacttaacgtaccattctatgtacaagaaatggaagaaggtggcatttatcccattgatattgcgttcatcactgattgggttatctcttatgaaggttatagttatacccctaatacgatttatcaactttttagccaccagcagactcactaatcccactaattaactagcactattctctgcaacgggatctgtcagtatgaccttgatgatagatcccgttaatagcattcactgattgttacactaatgatgcgcaattatctctaactgttacagtttgttttttgatgaataacagtacagccttcacggcatttatctgatagcttttcgaccattattataaattaaattgatgtacatcaagagaacacatagccattgtgggctaaattatactcaataaagatggttataattctcatttgcattaaatatttacctaatcaccctatttttcttgtgcgttttctttttaaatgcgttaataattatcagtatcattattttttgtatcaatataattagtggaaggacgttttatgtctctcattccaaatcatagctacaagatcctcagctattccccgcaaattagccctgcctatcggcagaagctattatcattagggatgctgccaggcgctattttcaatgtgatccgtatcgcacctttaggtgatcctatccaaattgaaactcatcgggtctctttaattttgcgtaaaaaagatctcgctttgataaatcttagcgaaatcgctcataacgaaaaataacagcttatttatcaactactcaggcaatacaactactggcatcactattatgactcctcttactattggtcttatcggtaatcctaatgcgggtaaaacaacgctttttaatcagttaacaggctctcgtcaacgtgtcggtaactgggcgggtgttactgttgaacgtaaggtaggtcgctttacaaccaaaaatcataaaattgaattagttgacttaccgggcacttattctttaacaacaatttcagaacagacctctctggatgagcaaattgcttgtcacttcatcttaagtaatgaagcggatatgttgattaacgttgtagatgcttccaatcttgaacgtaatctttatctcacattacaactgcttgaactcggtattccctgtatcgtggcactgaatatgcttgatattgctgaacaccaaaatatgcaaattgatattcaagcactttctgaacaactcggttgtccggtgatccctatggtatcaaccaaggcatcagggattgataaactgaaagacactattgatagctttccagccaccaaaagaaaacccgaagagttactaacttcttatccaacatggttattaaacgaagttgaatctttagctgaaaaaattaatcacgatgaattcaatttacagcaacgccgttggatggcattacaatgtttagaaggggatatctatactcatcaacgtgctgaaattacctcacaagagataaaagccattcgtcagcgcattcaaactgagcatagtaatgagccagaattagtgattgccgatgcacgttatcaaaacattgagcgtatttgccatgcagtcattaatatggagtccattaagcccaatcagctcacacaaaatatcgataaagtgatattaaatcgctggttaggtgttcctatcttcttgtttgtcatgtatttaatgtttgtgcttgccatcaatattggtggagcattgcagcccgcttttgaaggtggctctgaagctatctttatacatgggatccaatggctaggtgcaacattcaatttccctgaatggttaactattttccttgctcaaggtgttggtggtggtattaatactgtactccctctggtaccacaaatcggcatgatgtatctctttttatctatccttgaagactctggctatatggcacgtgctgctttcgtgatggatagattaatgcaagcgctaggattgcccggtaaatcctttgtaccgctgattgttggatttggttgtaacgtcccatctattatgggggcacgtactctagacgccccaagagagcgattaattactatcttaatggctccctttatgtcttgtggtgcacgtttagccatatttgctgtttttgctgccgcattctttggtaaaaatggcgccagcgtggttttttcactttatttattagggatccttgttgctattttgacgggtttactactcaaacataccattatgcgaggtgaagcttctccttttgtcatggagttgccggtttatcacgttccccatatcaaaaccttattaatacaaacttggcaacgtttaaaaggctttgttatccgcgcgggtaaagtgattatcatcgccagtatgtttattggtgcattaaatagcttcactttttccggtaaagcggctgatagtattaatgattctgccctcgcttccgtcagtaaagtaatcactccgttattgcaacctattggtgtgcataacgataactggcaagctaccgttggtttagtcactggggcaatggcaaaagaagtggttgtgggaacattaaatacactgtacaccgcagaaagtattgttaatgaacctttcgttcctgaagagtttgatctatggggcgaaattggtgacgcctttgctgaaacttgggatagcttaaaagaaacctttacattcgccgcactttccaatcctattgaggcaagtaaaggtgatggtgaaatggatacggggactatgggtaccatgggcagcaaatttggtagtgcaatagcggcctatagctacttaattttcgttctactatatgtgccttgtgtctccgtaatgggggctattgctcgtgaaaccagtcgtggttggatgacattctctattctttggggattaaatattgcttactcacttgccgcgttattctaccaaacagcgacatttagcgaacatccacaaagtagtaccatcaccattgctgctgtattgatatttaacttaattgtctttgtactattacgtaaatctcgtcatcgtctcagttttaatttaagtaacaaacgctcattagcgaaacagtgctgtggtaaacaaggtagctgtcactaagtcacaaaaggaaaaataagatggcaagtttgatgcaagttcgtgattgtgtcgcgcttaacggtcgggctgatgctcgtcttgtcagccatcagcttaatatgcctgaacctatggtaaaagcgatgttagagcggcttacattaatgggtaaattagaagaggtcgatgtagaagagtgcttggtgggtagctgtaaaagctgccctgaagccaccgcatgtcagactaaagtttatcaattacgctcctaactcactgtctcttttaaacacataccttccatatccccctgctatctcacagggggtttttctgataatcaaaatgaatttttttcaacttttgctggttattcttcattttacttttcccaccacctgcgcataatccaatccttaaatagccataaagacatctaaatgtccaaaatgaaattatatacatttaccttaattaggataataaattatgccgattactgaattctcatccattatctctacgggtacacaaggtgggttgcagatgcaatgtgcttctcgccaatttcaattattacttgatgagcctatttcattgggtggaaacgataccgcgatgacccccgttgaagcgctacttggcacactcggtgcttgtaaatgcattgttgctaagagcttcgcccgcctacaccatattaatctccataatattcgtattgaggtaaaaggcgagctagatatcgatggctttatgggaaagaataaacaggctaaaatcggctttagtaagataacgacgcatttctatatccaagcagataatagtaaaacagaaatagaagcttttatcgcctttattgaacgaacctgccctatattagataccataaccaacccaccagaatgcgaaacgctatatcatcttgaatagtctattagcgttataacctcttcattcatgccagaattgataaggcctcacactgctttaacaaggtttcactaaattcatccggatgagaaataaagggagcatgtgcggcatggcgaaaaataaccgaaggagagtcaggataacgagcatctaataaagctgcgacttttcttggcactaaaccatctaaataaccataaagccgaataaaaggacaacataaggtagtaagctgttctcgcaaatcttctgtacgtaaaatttccagcccgccgtttaatgtttcaacggaaggcaaaggttgtgccaacacgaccgctttcaaggccttagtatcttcacgagcactttgagtaccgagtgtttgcaaggctaaaaagcgctcaaccgttcgatgaaagttatcactcaattgttgctcgaaaccttttaacacgtctggcttaattcctggccatgcttcatgagcagcaaaacaaggggaagaggcaacggtaattaacgcccgtacattattaggattatcaagtgcaatacggcttgccactaatccccctaatgaccatcctagccaaatggcttttttttcaggtgcctgtgaaaaaacaatatcagccatctctttaagcgttagcacaggaaaaccttggcttctgccatatcccggtaaatcaaccagatgcagggtaaaatgcgagcttaatcgcgtaatgattgattgccaaacctgagcattcaagccccatccgtgcaacagcacaagatgcgtttttccttcacctaaagtctgccaatacaatttattcattgttatgctctcttctcttattttacagggatgtgcactatgctgataacaatagcaggatattgctggttatgtcgtcaaccattgcggtatggtaaccacagcatttgttcaagttgtattcgtcatctgccacaacaaaataatcgttgtccgggatgtttgtatccctctacccactcaatgatattgtgtggacggtgtttgcgatcaccacctcgctggaaacagatgttgacagtcactgactatcgcccaccgcttaataaattattacacctttataaatatcatcctcgccctcagatagcattatgtcttgcgaaactttttttattacggtggcttgctcatcgtcgcgagaatttagttcgcaagccagagcaaattattagcgtaccgctacatcgacatcgtcgttggcgtagaggcttcgaccaagttgaggctatcgctaaacctttggcaagatggttaaattgtccttatcaccctaataccttgataagaactcgtgctacactggcacaaacacatcttaatgccaaacaaaggcaacaaaatttaaataatgcctttatcgtaaatcgcacagtgtcagtggcaggtaaggatctggcactgattgatgatgttatcaccacaagcgcgacgctcaatgctattgtacctttgctatttcgtgctggagcacgctctgttgaggtatgggctatttgccgaaccttgtagttaaccgtcaattgggcgtatgataaccaaccagaacagtcaactattgagcaagacgatatgattactattactgatgccgcacaggcacacttcgccaaactattggctaatcaagaacccaatactcaaatccgtgtttttgtcattaacccaggaacacctaacgctgagtgtggcgtttcttactgtccacccgatgcagtagagccgaacgacacagaaattaaatttgaaaaactttctgcttatgttgatgacatcagtgcacctttcttagaagatgcagaaattgactttgtcacagaccaattaggctcacaattaacattaaaagcacctaatgcaaaaatgcgtaaagtggctgacgatgcgcctttaattgaacgtgttgaatatgtactgcaatcacaaatcaacccacagttagcgagtcacggtggccgcgtaagcttgatggaaatcactgaagatggctatgctatcttacaattcggtggtggttgtaatggctgctccatgattgatgtcactttaaaagatgggatcgaaaaagagctacttaacctgttcccagaagagttaaaaggcgtgaaagatttaaccgaacaccaacgtggtgatcactcctactactgatcctctattacaaatcccctttgatattcacctgcacagatatcctaggggatttgtgtatatgccattatcatttacaaaaggtaacgccatctttactgatttgacgttattatagtgatatcgttctctcgctcagaacataacaatgtaattaacaatataataaataagacaattatggatagttttcaatttcttagtgttgaacaagcctatcaattttgggtatctcaatcggctattttagttgatgtaagagatccgcaaagttatcgtcttggtcatgccactggcgcttttcatttaacaaatgatacgcttaaccaatttctacaagatgcggattttgatgttcctgtgatggtgatgtgttatcacggtcatagtagccaaggcgcagcacaatatctggtcaatatgggctttgaaaccgtatatagtattaatggcggttttgaagcatggctaagagagtttcctcaagcgataacttctctgcaataattacagatgagtttctcaatgatccacattatcacactatctaacccacaacttgctgatatgttcgtcaattatatggcgacaaaaggtgttcggatccacgcaaaaacagaaaatcaacaagtcagcctttggttggaaaacgaacaacaactcaatcaggttgaaagtgagctaaaaacctttcttcgtgaaccttttcaccctcgttaccaagcggcaagttggcaaacaggtacgcctcaacgtacgggtctacaatatcgcccggctttttcaatcaaaagcatggtgcaacaatcaggccctttaacggttttgaccattattttatgtgtgctcgtctttatctggcagcaaatagtgggcgattacaatgtcatgttacaccttgcatggccatacgatgctagtctcgattttgaactatggcgttatatcaccccagcatttgttcacttttcgctcatgcatatcgcctttaatttagcgatgtggtggtatttagccagccaaacagaaaaacaactgggtacaggcaaattatttgtcattatgctcatttctgcgctatttagtaattgggcacaatcactgtttgcagaatccaactttggtggactttctggtgttgtttacgcgctaattagctatgttggcttaacaggtttgcgggccccagaaaaagggatcggcgttcctaccggcttaattgttttttccatattgtggataatcgcgggttatatgggcgttttaggtgattctatcggaaatgctgcacattttgccggcttccttatcggcttattgatggctttgtgggataatcgacatcaattatctcgtcaatcataataaaattaacatgatatttttaactttaggggacacctgtgaagcaaacacaacggcatgatgccatcatcgaactggtacgcttacaaggctatgtcagcaccgaagaattggtggaacattttgaggtcagcccacagactatccgacgtgatttaaatgaattagcggaaaagaacaaaatccaacgtcatcatggaggcgctgcattaccctctagctctgtgaatgccgcttaccacgaccgtaagatcatgtggtctgatgaaaaatcacgtattgcccaacgtgttgctagcttaattcctgatggtgcaacactatttattgatattggtactacccctgaagccgtagcccatgcactgattaaccataaaaatctgcgtatcgtcactaataatctaaatgtcgccactttattgatggataaagaagactttcgcttgatcttagcgggtggcgaagtgcgtacccgtgatggtggtattgtcggtgaagccaccctggattttatctctcaattccgccttgattacggcatcttagggataagtggtattgatatggacggatctttgttggaatttgactaccatgaagtccgcactaaacgtgccattatcgaaaattctcgttgtgttatgttagtgaccgaccactctaaatttggccgtaacgcgatggtcaatcttggtaatatgaatctgattgattaccttttcaccgaccaagagccaccatctggcattcaaaaaattattgaacaacataacgttcagcttgagctttgctaggataaccctctattaaaaagtacctttcggggtactttttcctaaaattttccgctttttttacctatttattcttttgtcaaaccccattccctttcctattcttatcaataacatcatttgttcttttcagttaataagcacactaaatgtagggatatgataataaattgttatttatatcacgcagtaatgttttttatcggttatatagttggcatttccaacaaaattcattacaattatgagcgaaaacgaacattaaagaattgtttcgcgcattcttaggaggatgttatggaaactaaagacttgattgtcatcggcggcggaataaacggcgctggaattgcggcggatgcagcaggccgaggcctttcagtattaatgctggaagctcaagacttagccagtgcaacatcttccgctagctcaaaattaattcatggtggcttacgctatttagagcattacgaattccgtttagtcagtgaagcattggctgaacgtgaagttttattgcgtttggcgcctcatatcgcatttccgatgcgtttccgtttaccgcatcaaccccatctacgcccagcatggatgatccgcattggtttattcctctatgatcacctaggcaaacgtgtcagtttaccgggcagtaaaagtattaaattcggggctaactctgtcttaaaacctgaattaactcgtggttttgaatattccgactgttgggtagatgatgctcgtttagtagtattaaatgcgcaagagatcgttcgtcgtggcggtgaagttcgtactcgtaccaaagtgacgcgcgcttggcgtgaaaacgatttatggatggtggaagcacaagatttacgcaccggagaaacttctcgctaccaagcaaaagcattagtgaatgcagccggtccttgggttaaaacattattcgatgaagggttaaaattaaaatcaccttatggtattcgcttaatcaaaggtagccatattgtgatcccacgtgctcacgatgaaccccaagcctatatcttacaaaatgaagataatcgcattgtattcgtgatcccttggatggatgagttctctattattggtaccactgatgttgaatacaaaggtgatccaaaagatgtggctattgataacaatgaagttgagtacttattaaaagtctataacgaccactttaagaaacaactgaccaaagacgatatcgtctggaattattcaggggtgcgtccattgtgtgatgacgaatccgattcgccacaagctatcactcgtgactataccttagatgtacatgatgataatggtaaaacaccactactctctgtgtttggtggtaaattaacgacttatcgtaaactcggtgaacacgcggttgataagctaaatgcttatttccctaatatgggtcaagcgtggacaaaagagggtcaattaccgggggggaacttagaaggttacgatcgtgatggctattcacgtcttattcgccaacgtcatccttggttaccagaagcattagcactacgttttgctcgcacttatggtagcaatactgaagtgttgctagaaggaattactgatttagccggaatgggcgaaaatttcggtcataatctttacgaagctgaattacgttatttagttaaacatgagtgggtgattgagcttgatgatgctatttggcgtcgtaccaaacttggtatgtggcttaatgatgaacaaaaacaacgtattacgcaatggttagaggcaaatacgcacacagcataatgcagtaaaatattctctgactctgttcaatgttcttattagcaatttttgtggcgcgataatagcgccactttttttattgccgcatatgatgctattgacattacacctgacaaactcatcgataattgcttcagctggttttgcactgtttttgcaaaaattccattaaaaccacagcattattctgtttctcatctttagcggaatacagtaacactaacggtttttctttggctaccttcaatagtggttgccaactttccggtattgcttctaattcttttatatagcgagccgtaaattgtgtgaaatcgccattttcatgaaaccattttcttaattcagtagaaggcgcgagcgctttattccattcatcataatgaaaatcgctctttttcacccctctaggccataatctatccactaatacacgataaccttcatgcttaccgtctttatcatcatagacacgtttacaagtgatcatttctactcccattcaatcaatgagttaattttattatagaagaaaatcttcaaacgtatcccttctgcgactttacgttatttaaggttgtcatcgtgcaacatgaaattttctcttcttccgattgaattatcctcattgaaactaaggtgaataactgttgactaaataaccgaattaagagaatctacatctagacgtctaaatggttagatgggtaaataagtagcgatacttaacggaataacaataacaacatgtgacacaacgattgatgaggtataggtatgagcttttatcacgcaagccagcatgaagcgcttaatcaaaatcttgctgaattagatggccagatccaagtttcttttgagttttttcctcctcgcacacaagagatggaaaatacactctggcaatcactggctcgtttaaataccttaaaacctagctttgtttcggtcacttatggtgcaaattcaggtgaacgagatagaacacatgccattattaaagatataaaagagcgtacaggccttgaggcagcaccacatttaacctgcattgatgcctgtcgtgaagaattacagcacattgcccaagactattggcaaagtggcattcgtcatattgtggcgctacggggagatttacctgataacagccagaagccagatatgtatgccgttgatctggttcgtttactgaaagatgtaggagattttgatatttcggttgctgcttatccagaagtgcatcccgaagctaaaagcgcacaggctgatcttattaatttaaaaaagaaagtggatgccggcgctaatcgagccattacacaatttttctttgatgtagaaagttacttacgctttcgtgatcgctgtgtttcaacgggtattgatgtagaaattgttccgggtattttacctgtcaccaattttaaacagttaaaacgttttgccggattaaccaatgtgaagatccccggttggatgcataaaatgtttgatggcttagataacgatccagaaactcgcgcactggttggggcttctatcgctattgatatggtgaaaattttaagccgtgagggcgtgaaagatttccatttttacactcttaaccgctctgaattgacctacgccatttgccatacattaggtgttcgcccacaacttgcgaaggtttagtcttatcaccccgcccatagtctattggcggggtttttctaggcgagattattttgcaaaatgataaggttgctcgataggaagtaagctatatgcagtatctagatcgccattagtaatacaagtatctattttacgcactttatcagtaatatcggtaatattaacaatccactcattgcaatatttttctactgcttgattacgtaaccctatttgaatagtgcgataacttaagcgattaagataaatatctcgttcaggatcccactgaatacgaatatcactggtttctgttgcttcttgccattctttggcactcacatagtggtctggatcgaaatgactgaccacaccttgtgttagcatctgttgaaagccttcatgggtaatatcaacagccaaaatagacgcttgattgggatctttgcgcccccaccctgagcgatacatcatccaaagaaaggagggttttacccaagtcatacgggtcatactaaaagggggagaaacaaaagtaccatttgcgactgcgctctgagcgatagtagtagaataggcttggtaaacacggacaaaatcatccgtataatatgcccttacttgacactcaggacatcggtcaacatcatcgttcatctttctttaatatccttttatattaataaaatggagctatctgcttaaattatgagcctctaaccagagataatcaagagtccctattttcattagggatttaatagaatatgacatcgtgacaagccatacaaaagaatgatcataaagcgcataaattaaaatggccattatcgctgcaataataaaaaatttaatcttgcaaaatatatcttacactacgtccaccagcgcccaaggcgctcaatacattgtactgattatcaaaacgactcgatcacgaaatttacattaagttctcttttattttctgatcactagcgctgactaaataattattttctcttttcttctttctttataggaagaaaggaaaatattaagcaaataatcacaaatgatactaatagtattcgaccatagaaatagggaaaaaaccgaacaatcaaaacactataaaggacaaaaaaaatagcaataatgcttaatattaaagattgtttaaggtctttttaaaaaaaaagaaaatatttttttcatacatagcctacattaaagtcgcatatctgatgatataacattcatcatatcagaagagaatgggtagccattaaccacatatatccccccaatgaggcgaatagaaagcttattctactcacaaagtgaggcgaataatcacgatatttgactcatgctcctgcaattaggcgtttgataagttgtgttttaattaatggaggcgctttcactacgttacctgctatcttagcagtcatgatttcaaaggctttttctaccaataaggtttcatcttgcttcattgaccagacattattaggtaaaaaacttaacataacgtgatcatcaaaagtacctatattgatatgtgcgggaataacaccttctgtttggcgaatagcacttaatacgccttctaaaatgggcagtgatgaggcaataaaatgactggggatctgccgatgttgttcaagatattgcttcatcatctgttcaccatctttggtggtgttatgttctgcataggaaacggttacatggctttcatcaccataatgggctttgatcgcctgaacataaccgcgcaaacgagctgcaatagtaggaagaagagcatcaccggcaaaaaagtggattggcgcatcttgctgtatcatcgctttcgttaattgtgcaccactatcacagttatcagacgccacgcaaattgcattactaacagaaaaatctctatctaagaacactaaaggcttttgacgatgtttaacgtgatgttgctgattttttcgactcgctgaaacaataaaaatcccatcaacattacgctcatccatagactttacgagcttattttcatttttaatatcaccataggtacaacttatcatcagctggcaaccaatttggtgacaatgcatctctaacttttccgctaaagcagcaaagaaggggttggacagccgaggaataaccagaccataagtatctgttttattgagttttaagcttcttgccgcatggttaacggtataaccaaaaacttcgacataatcagcaatttttttctgggtttttgcactgatccgatattgatcacctttaccattgagtactaatcgtactgtggtgatagataaattcagatcatttgcaatttgttcaactgtttttgccattaatgttccgtcattgatattgccctcattttgctaacaatgagggcggattaacctttattaagcagattgactacgccattttttccacattgattttaacccaggtccgacaataggtaacagcagtgttaatagtgcaatagcgaggaatgtcgcagtaataggtcgtgtatagagaatcgataaatccccttgagacatcattaaagcacggcgtaagttagattctgccattggcccaaggataatacctatcaccaccggagacatcgaaaaatcgagcttaatcataatataagccagtaatcctgcccccatcatcacaaaaacatcaatgatgctatggttaactgaataagcccccacactacacaacacaaagataatgggtactaatactcttcgtggtacatccatcacacgtacaaacagtttcatacacaagaagcctaagataccgagaaaaatattcgccatcattaagccgataaaaatactgttcacttcaacgggattatccgtaaataactgtggccctagcgctaatccttgcaccataaaagcccccataataatcgccgttgcgccatcaccgggaatacctaaagtcattagaggtaccatggtgccacccgtcaccgagttagcccccgcttccggtgctgaaaccccttcgggtgatccttttccaaattcttcagggtgttttgaccaacgttttgcttcgttatacgagataaaagatgaaatatctcccccagtcccaggaatagcaccaatagccgttcctatcgctgatgaacgaaaataggtaggtaaaacacgtttaaaatcgagccacgtaggtaatacacgatgaatacgggcattaattttctcgcttttcttctgcttgcgctcacgatactcttcttcaaagctaatcaagccttgagaaaatgcaaagagtcccacgaggattggaataaacgagacgccccccataagatacacggtatcaaacgtaaaacgtggccctgctgtcataggatcaagcccgatagtggcaattgcaagaccaatcgcgccccccattaatcctttcacaatcgattgcgatgatacactggtaataatacttatgccaaataccgcaagagcaaaatattcagcagcagagaatcccgtcgccacttttgccaattgaggagcaataacaattaaagcgatagtactaaatacaccaccaaacatcgaccccatggttgataagcctaatgctcgccctgcttcaccttttttagccatcggatagccatctaagacggtggctgcagatgcaggtgtgcccggtgtactaattaatatcgcggtaatggagccaccataaacagccccacaatacattcccaataataataagatccccgtcattccttgaaaggagtaagtcagtgggagtaacagtgcaatgcccatattcactgttaaacccggtaatgcgccgataataatccccgcgaaaacccctaacaggatcattgttatcgtttctaaactaaaaacgaccattaaagcatctaaaatttccataccaaggctcctttaccgcttactcaaaaaagacagaggttggcagaggtgaattaaaaataatgtcaaagaaaacataaaccgcggctacaatcacaatcgggatcaccaccatggcaataggtttcctctcattcatcaaccacataatgattgggataagaagcaatgatggaacaataaagccaaatagatataaacctgttgcatatagcagcataaaaatgcctaagccataagcacgcttaactgcggtcgaacttaaatctacggactggtgtacatgtttaattttatcaaccacgacacctatccattgaaaaatccccagtaaaataaataagatggctaaaccgtaaggccaaaaacgctccccaggtacaccatattcatcaaacatactcatatcacgggagagatagataataagtagcccaaaagctactgaaatcgcaccgatgattgtattgattttagtcatgtcgggatctccccgaccctatccgacttgcggatagggtggtttattatagaaaggttattttttcagggtggctgagattaattcagcatacatctcatgatcttctttcatcatttgatacgcatcgtcaccgacgataaatactggcataataccttgttttttcaatgcttcttgatattctggtttttgaaccacttctgaaaatgcccccactaactcatttttaacgttatcaggcacacctgctgttgtggctaatacagcccatgcgcgcattttcacgttggtatcgagatttaaggcttctttaaaggttggaacatccggaataagtgggaaacgacgttcatccatcacaccgagaacacgcaagatacccgcatcaacttgtgatttaaccgcaccgggtgtggttaatacgccatcgatatgatcgcccactaatgcagcaatagaggggcctgtaccttcgttataaggaatatgattaaacttagttcccgtagtacgttcgatattcacccccgcgaggtgataaatagctcccatacctgagttaccaatttttaatttaccagggttcgcttttgctccggcaataaattcttccaatgttttataaggtgaattagcattcaccacgagcacaaccggatcagcaatcgttgtcgcaatcggggtaaagtctttataggtcacgggtgacttaccttgatgtgggaacatcgctaattcaaccgtcgtcatgactaatttagtgccatcaggacgcgcatttgccacttcaattaacccagttaaaccattacctgcgggtttattaaccggtacaaagatacgccctgctggcatcacatctttagcaaattcaatgatagtccgtgcagaagtatcagtacctccccccgggttttttgggataaccacatcaatatttttagtaggatacgttaactgttgggctacagcattccccatgcccaatgtcatcgtaagcgccaacgctgcgagtagactctttttcataaaaccctttctccacatttttattgagtagctattaactgctgataaacaatgttttttctgttccaagtaaaagtcacatgtagggtattgttttcagcaataatagccggatatgaaaattcgccttccccatcgagtaaatcgaatggttcagaccaagtactgccattatcggatgaaagactgacagagataggataacgacgactccagttgcctgaattcgggttatataccaatgccaacagaccatctgcgaaggagacgacatcaatgccgctattattatttggtaaggttgttgcataagccggacaccaactgcgcccataatccgttgaatcgctacgataaattttaccgcgcgtactgcgcatcatggcatgcacatgtccaggctgagatccccatagtgttggttgtatcacgccatcccattgaaaaacacgttgtagatcagtctcccacaaggcatcgtcctttagcccttgccagatttcatgctccgcttgccctccttgatgatgggcaatcggaatatccactcgctgccagtgttgaccattgtcgctagaaatatcgacaaacgcatcccagtatcgatcatcctccaccgaccccggtgctaaccactcgccgtttgacatcactaatactttgtttttcacaggacctctaggtgttacatcacccgaaaccaattcacttggtaaactccagctatttccgccatccttcgagataacgtattgggtcgtccaactatgtacatcaggacccgttttataaaacagccagatattacctgttgatgggtcaacatgtaaaactggattccagtgcgcaacacctggatttttaaccacaggttgagcgggttgccaatcatttccctcttttatcgccaaccagatagcggtattaccgctaccctctttatcgccagcaaaaaaagcggttaataaacgctcagagttaggcacacgcacaatcgttgaagcatggcagtgattaaaaagtgaatgtgcattatccagcacaaactgggtttccttcatcacgaaaggcatattcctactcctgtgtcctaaattaatttaacgaaagccacttcttcatattttcacccaatgccgtcatgctattaacagcagaagggaaaaatgagttttcaaactgactactattacgagagcggcaaaccagtgtcgcgaaattgccgatcaggcgctgatgatatttagcgcaggcaggataatccagcgtttcagtcatcgcagctgttgataaataatcagctaatagcgcagcttgctctggtttatcctgccaattttcatacagccagacataaagttcggggtggaagttagccataacaccactatatgcttggcatcctgcttggaatgacgctaataaggtttgactattagcattggctagatgcaaacgacttccttttgataatgctaagcgacgttctatgagaggaagagaacagcaagtatctttaataaaggtaaagcgattactttgtgcgcaccactctactatctcttcagataacaagcgtttgtaaggataagggcattcataaatacccaaatcaatctctttaggtacagcatgggttaaggattgtagcgtttccagcgccttatcatcagactcgcccacttgcgctaagcgattactgatcataataacaccatcaacgccggtactcgccattgcctgcagttgttctttttgctggcttaaggccgttgccgtatggccagaagcaacaacaggtactcttccatctgctttttcaacgataaaacaggtgagtgcttgtgtttcttcatcactcaaataaaacatttcgcttgattggcaggcggcaaataacccatgtacgcccgcatcgatataccaatcgacaaggcgctctaatgacgcccaatcaatctctcctttagtatcaaaaggagtgagcatcacaggccaaacaccaacgtatttttgctgactcattataaattccttacagtaagttaatggcatcacctgccactttcacttgaataccttgagtcagtgcttgagcaacaaaggcttgtagcacaaacgccaatttatcgtcatcaacataagccactgtaatatggttactttgatgtcccgccataagatcatcacgagttacaccatctaaagtacagttgagtaatggccattcgtagttagtggctcgacggcgacgttcaaactctgcctccggtaattccaccgccatacctgtaccaatatgcataatcacatctgtaccttgatagtgtgcacgtgcccataacaaacgccctgctttaccttgacccgctatagttgatccccctttagggaaaaacatagctggctgacggtaacctgttgcgcctttgatcccacctttaaggtgttcaaaaggcacagagccggaaatttccatatcccagtagaaggttccctgatactcactcccccaacgaatatcgtgtaatgttgtttctgcaggcaagcctaacgaggttaataaacgccataacatcgtttgtggaatagctgtacccatatcgacttcgttgatacaagggatcggtgtgttagggctgataatgtcgccattttcatccggtaacgggaagcgtgccgttgacccaattgcaccttcggcaaaatcagaggcaggacaacaatcttttaatccttgctgatattgcacgcctacagcggttaagccaaagcgtttaacgaaacgcgccattgcaatcatcatggcacactgctctttcacctgttcacgagtcagttcagttttatcatctgtaccaaacttaaacgtcatgccattattttcgtaccattgcacacactcttctcttaatgcatcaggtacttttgccatttcgaccaataatgcagattgagagagtgattcaatgggcataccaatatcgatcattgcctgttgtgggaagaccccattaatcattcccatacagaatgtatcgaacaaacctattatttctttatttttaattatatattcgccgacttttcgacccacttcgccagcttctgtcgccattaccctgtgtgttggcgcaacttctttaagatagctaagctgatgatttacataaccatatttcaaccatgttgctaagccatcaataaaaaatgtatcgtcaaaattttctgaccataagcgtgaataatttttacctaaactggttaacgtccccgctaaacacaacatgccaactagccccggccatgtaccatcaaaattagccagcaacagaattggcccgcgatgatgcgctaatgaagaggcaatatggtgtgagtattgccatgcggttaatagcacaataacgggtgcatcaggatcgatagccgcaaacatatcgcaaccttcacgctgactactgataaaaccatggcctcgtgcttcatcaattttatgtgcacgtttcatggtgtaaccttgtgcttttaatgcagcggctagcttatcttcaaattttttctgcacaggccagcatgttacgtttgcaggctcacgtaagtctgcgttagtgaccatcaggatctcattagcttctgcactgataacgtccggtaattttggtagatttaagttcaacataagatatccctggtaaggtaaactcgattcataatcggaaaaatttatggtcagcaatctgccatcatgtcgttatagcgctgctgatcttgatacatctgtaaataaacttggtatttcgcttgatggaaagcaaaggtgtcactatcgggtgtaataacaccaccttctcgtaccatggtatttgctgcttgagaaaaattatcaaaggctttacatgccacggcgcctaataaagcagcccctagattcaccgcatcttcttcttgcgctaaatggatctcacgacctgttgcattggcatattcacgtaaccacagtggatttttggtcgctcccccacacataacaaggcgattaatttggtgccctgcatcttcaagggtgtcaataatatggcgagtgccataggcaatagactgcaatgtcgcaagataataacgagccaaggcaacccgaccactttcaagggttaatccactgaccattcctttggcggcaggattagcacgtggagagcgattgccatgatggtcagctaaaacatgaaattgtgctgttggataaggttcattttcttccaattcagcgacggcttggtttaataaggtatagtaactaacacttttttctttcgcttcttgttctaactcagcccatgactcatggcggcggatagaccattcaacgagcgcaccggcagcactttgccccccttcgtttagccataactctggtaacattgcgccaaagtaaggcccccacaccccgggcaccataatcgggtattggctgacaatcatatggcagttagatgtaccactgataatggccaaacttccctcaggttgtgatgcggttaacgccaacccacccgcatgagcatcaataatgccactagcaactatgacgccagtatgtaatccaaaagcctcagccacagaggtcgttaaacatccggccgattcacctaaagccaaaatggtttgtggtactttttctaataattcatccaaacctacatcagctaacaagctttcactaaaatgcccttggtgtgccaaatagttccatttacacgttaatgtacagatactggcaacatcagcagtggttgctttccacactaaaaaatcagctaagtcaaagaatcgccagacatgtttataacgctccggatagtgattttttaaccatagaattttaggcaattccatttcaatgctcacttcgcccccgacataccgcaaaacgggatcgttagtcagattaatggtcactgtttcttgtactgcccggtgatccatccacataataatatcctgctcaggtttattactgggtgaaaccgaaagtgcttgcccttctttaccaacggccactaaagagcaggtggcatcaaaaccaatagacttcacatggagaggatcgatggctgataatttcaccgactcttttacagtggtgcatacttgttgccaaatatcagcggaagattgctcgacaaaatccgttttcgggcgaaattgtgcaattggacgcactgaaaagcccagacgctttccaaagctatcaaatactgctgcacggacactggctgagccaacatcaacgccaataaaatattgttgttccatgcgaaccctcatcatttgctaacgctatgctaatttttgctacttcgagttagcaagttaattcgagcatggagaaaaaacaatcacaataggattggtttgtgatgcagatctacatcaataatttaatacattgatttagaaagaaatttatttatttcactttgttcaccattttaatagcgaactgaaacgattatgttcgttataaaacaaacgaacatttagctatcaatgagaataaaaaccgtagttaacatattaatatcactatcaatataggatgttattaaaatatacctaactaatagtaaaatttatttttaaaaagagtaatatattaaaaataaccatttttctatttttatcatattcaatcatttatttttaatagactaatctttagttatatattcatttttggagtattaaattatgttgaaaaatattgctatcagtctttctttacttcttatcacttcttcggctttttcagccacactggtagaaagagaattacaacagaaatttgaagaaaatattcaatcccgtgttgtagacttaaataaaagctgtgatgctaatataaaagttgcgtttgattggtcggcatttactgttgaggatctaaaaacaacaggtattgatggttattgcagtgaagggttaaaaggtgtcattaatacctgtgaaagctcgaaaatagcacaagaaaccgtaaaagagaaaatacagaatattacctgctctaaagcgtcacctcgtagtattgaacttaaagatgggacactgaattttggtattgattttaatgctgcaaatgatgccaacgctattcaaacgcatttaatgaataatctctaaatagagtaaatacagcaagcaatgatgcgataatacattattgcttgttgattaaataacagattgaattaattttttagcataaggatgagtaacagtacttaatttatttatctcgcataattcaatttgttgaccttgtaaaataaacatgactttatcgcaaaaataagtcactgtttgaatatcatgactaataaaaagataggataattggagttcctcttttaataattttaataaatccaatatttcaacttgtgtaggtatatcgagagagcttattgcctcatctaaaataattagttgtgggtaagatgctaacgcacgacataagcaaactcgttgagcttgcccaccagacaattcaaaaatataacgctgataacaacttttaggtaattgcaccttctctaaaaaagaaaaaataattgtttctaactcgttatgacggagagtcggattaatcagtttaataggttcagcaatcatttcacccactgtaaaagtcggattgactgaagcgatatgatcctgaaacacaatacttattacaccttgtcgataacatcgtttcgtcactggcttatcatttaaataaatagccccttgatcaggtaattctaagccactgattaaccgtgcaagggtactttttccactgccactttctccaactaacccgaaagcttcacccttttgtatattaaaagagagcgcatcgagaatagtcactttttctttaaaaaagcgcgcccctttttgataataatatttactgacgttgtctactcgtaatagcattcgatcctcttgttgtttatcgccgtttcatgctgatcaccgagcataaagcacctgtgcaaaacgttgggaaagcttagctctagcctcaattaaataacgggtataggcttgcttaggtgtatctaatacgctgtttttgtcaccaaactcgattaattttccctctttcatcactaaaatatcatcagcaatctgactgactaatcctagatcatgggagataaaaattaaggtggtgtttttagatatcgtgatacgttgcaatagctgtaatatttctctgcgcaagggagcgtctaatgcggtagtaggttcatcagcaattaataaccttggtgataacgccaaagccatggcaatcatcacacgttgtaattgccccccacttaattggtgaggaaatgcctgcataatcattaaagattgatgctcaaacacctcatccaatgcttgtttagtggcattgaatgcttgtaatttagtataagaaaaatggtaaattaaagtttggctaacttgcttgcctatttttatcaacggatcaaaagcactcatgccgttttgcacaatcatacctagcgatgtccctaatagggcacgccgttgttgctctgaatataaatgaaggggcttttcatcaaaaaaaatttctcccgatagtgcaagtgtacttggaagtaagccaataatggctttactgattaagcttttaccactaccactctcaccgacaatagctaacgttcgcccctgtttaaggctaaaggagagattatctacccgctttttttcgctgtgaggatcatagattgagacttgattaagcgtcagtaaattgttcatatttatccccgactgattgacgattatcggggtcgaacacatcgcgtaaaaaatcgccccaaaagttaaatgcagtaacaacaaccgtaatcgctatccccgcaggtagcatttgttcgggatgtaataccatgacattttttgcttcactcagcatattaccccattctggggtgggtggctgtacccctaaccccagaaatgaaagagcagagatcattaaaataacactaccaatatcacttgaggctaaaacgatagtttcagctaatgtcacgggtaataaatggcgtcgtaaaatatgtgttggtggtgcgccaatcacttgagcataagcaatatagtgacgatgtgaatattgtcgaacaatgcctcgtatcattctggcgtaccaagcccatttaaccaagatcaccgcaatcaagatgttacctattccaggccccattatgcccactaaggctaagatcataatttccgcaggaaatgacaataccacatcacataaacgcataatcactgtatccgttttaccgtgaaaatagcccgccaacatccccattagccaaccgatcagcagtgttatacccatcgcatatatggcataaaaaacggtggttcgaataccaaagagtaaacgtgaaaacacacaacgccctaaattatctgtacccagtggatagtgaaagctgattggctgaaattttaagcgtatcgatgttaaagtgggatcatgaggtgcaaaccaaggtgcgcctattccggcgatggtaataataaccatcaccaataaacagagttgtgcacttttatcttgcgcaagtcgttgccagaataaccgccacattgttaccgccttagacgaggatcgactttcatctgaatgatatctatcagaaagttaaaaaagagaaataacaatgacatcattaaaatataagcttgtatcatcggataatcgcgtccaaatatggcactaatacacagtcgccccaccccaggccatgcaaaaatattctcgatcacgaccgtgcccgcgataagtttcggaatactcattcctagcgccgtcagcgcagaagcgagtgaattacgtaatatatggcgacgcaaaatcagcttatcaggtaatcctcttgttcgggcataaaatacataaggctgatgccattgattaagcattgcgccccgtaacaaacgtaaataagtgccgatataacctaaagagagtgcaaatgccggtaaaatgaccgattgtggtgtcaacataccactgacaggtaaccaatctaaatgaaccgccaccgcccaaattaacaacaaccctaaccaataattaggaattgcggttaacacaaaaacaatcagccgaatacttttgtctatcaagctatgtggttttgccacacaccataaggctaaaggtaacgcgataataagcgtaaataataatgcggtagccgctaaccaaagcgtgggggggagagcagttaacatctcttgtatcaccggttttcgggtcaaaaaagaggtgccaaaatccagttgaaatcccgctacaagccataaaaagtagcgtgtgaaaaaaggcttatctaaaccaagctcacggcgcataccttcaatcgcttcgggcgtcggtacaatttcgttaacacgcaaagccacttctgccggatcagacggtgctaaattcagcaaaacaaaggcaataaacgaaataatcaatactagcggcaatatcgccaataggcgccaacatagataacgtaacatctgctttaaccaatatggcaccggatcagtgccatattgaagtaacctcttaaattaatcggttattcggctttaaaacgcatcttttcaaaaggtatttcatattgagatggattaaaaccaacgttttccaattcactacggtaaatcgctttagtacgcgaataggttaatggtatatagacggcttgctccgctaatgaggtaaataagcgttgatataatgtctgacggcgatgttcatctggcgtaatcaacaactcgccaatcatcgcatctaattgtgctttattggctaaccctttctgtccctggtaatcagcatgagctggaattctaaaggatgagacaaaagaggcgggatcgtaaggtgttccccacgaaagagaatactgtaaatcgaaatcaccacttttctgtctatctaaaaaggcctgtttctcttcccctaataccgtcagtgccacgccaattttcttaaaatcatcttgcaatagttcggctatctctttttcaaccgcattattcacattataagagagcaataactgcaacggttttccctgtttttcacgcactgttttacccgcaggtaatagccagccttcctcttctaataacgaggcagctttttccggttgataaatataagttggtgaatcaaaatcgcaataaggtacacttcttgccattaatgtatcagcgactttttcacttcccgctaaaataccttgagcaatcccttctttatcaacggcatactctaatgcttggcgtactttttggcttgaagtaatagggcgactactgttgagcacaatagcacgagaagcaataggtgcactcatttgtgttttaaatttatcagatgccattaatgcgtcaaaagagtccatatctaacatgtcgccatctgcaccaaaaattagctgaatatctcctttttgtaaggataatagcattgtctgtctatcggggatcactcgccacatcaccccagttaatgctggtttttgcccccaataatgagggttaaccttaaattcagcatattgatctttcttatgttccgtgagcacccaaggccccgtaccaatataatgactcacccctgttttagttttaccgttaataaatgatttaggtgaaataaaacgaaatgggcgagttaagccaagttcagttaaggttggataatagggattttttaaatttagcttaacagtatactgatcgataacctcgacactgtcgatttgacgtaccaattctagccatgcatgacgctgataattatctaatacagcctcaatattaagttttaccgcttgcgcattaaaaggttcgccatcactaaatgtaacgtcttggcgcaagaaaaaggtataacttttaccatcaggagaaatttcccagcgttgtgctaaataaggtgcaacccccttatcggtatttaaaaccaaaggttcaaataccatgttttgtgcggccatttcaccggaataaagatgggggttaatatcacggatatcttttgtactggcataatccaatatattattactttgattggcaaaagcaggaaatacgcacgccaatgttaataatagtgtaggaataactgtaaatagaggtttcacattattttccttttatcattctcatcgattatttttctgagcatggatcataaacataggggttgagccgtaattaattttttcttcttcatcccaaacgtgatcaccaatacgaatatccacgctataacgaataaaaccgatatctagtagtgtattaatatcccactgtggacgcttaacttggcttaatggtaattggcgagcaattctttccatctcttttgtatcagtattaacatagtgatcagcaacttgcttttgcgccgctcgctctctatcagcaagaaaaccttgccaatattcatcatcaaacagatgtaaataccaattggcatcaaaattaattaagcttcccccaggttttaatacgcgaaaccactcttgataagcctcacagggtgattttaaattccatgtcacattacggctgacgaccaaatcaaattgttcatcgccaaagggaagatcttgcacatcaccacaaacaaagttaatagaaacattatgttggctggcgttatttttagcctcaagcaacatccctggcgtggcgtcaattgcagtgacttggtggcccgacaacgctaataaaatagcaaagaatcccggccccgtaccgatatcaagaacctttaatgtctccccttctttgacatggcttaacaataactgacgccatttttgctgtttttcacttaataactcttgctggttggcagcactatagctttcagcgcggatattccagtaacgggtcacatcatgaagtaattggttattatcgattttatttgtcatcaaaaacctgctgttgtatcaacataagagaggtaaaaattccctaaacgagaaaaagaaggggattgtgtgtcttcgtcagccaccttaccttttagtttcgagatcctccatgtgctatatcaatgatttttagctctccaaaggcaagctggctttcgttgactcacatcgatttttaccgaaacgcgttatcgtaaggtgtaaaatggataccaagcaaacagaatttaggctaatactgacgatagagaagatctagaaacaatttgcgcagatagcttaataaccgctattacgtcgcccaaatagtgttcttattaaggataaaaaatagcggccttgatttcttcttgcacacaaaagcgctatagtgattagatagtcatgttgattgataattttcttttcgctatcaataaaggcactctcatatggatctcatttcacgattaacaaccaataccactcgtgctgattttgccttagctcatcaacagcaattaatacagttactgatacaacactttcctgccaaatatcacaccttatttgcaaccccgcaaaaaactgcagaagatactattgaatggtatggtgaaatatccggtcagccagtggcattaaatgcattgtcagagcaacaacgccaagagataagagatgctctcgatgatgatttaaaaaatcttaaagagcaaacggcattacttgcttcacagcaacgcattaccgatgaagagcgccatctgcttgataccgcctcaaccctacccgatgcagagagcatctatatcattaatggaaaacccattattacttggtggcctcgtaccacacctttagcgccgactgttgcacaagtcactgctggctctagtgcagcagctgccggagcggcgcttgcaaaaatatcaccaaaaactcgccaccgttggttacgttggttactggtattattattggttttaattgccttagtctcatggttaagaggatgttttgatatcaatacaacgccttctatcaataatacttcagcgaccgctgtcgcaactcactctacctcaacgatgacagctacaactaatacgactaataagcaagataacctaacaacaaataaataactaaggtattaaataaaataaaaaatagcgttttatattgatataaacgctatttatttataaaaacaaacacgccaataaattattatttttatataaaaaaaacctattttatctcatttatctttttttattccaatttaaacaattgtcattactataattcaccattctaaatagtaagcaaatgggatattaaaaatgaaaaaacaactattatcagcattatttatcagtggaatattttctatttctaccgttcaagcacatgaaaatacctcattagataaaacaacaatttctgcaggttatgcacaaataaaaattgccggccaatcaggcattatgcgcggtggtaatctctctatacgtcaagaattcaatcaacagctaggtattatggcaattgctacctatgcgcaaaatgaatatgatttaaataagcctttaaaacaattaataaaagatgttgatgcccgctattattcagtgatggcggggccaaccttgcgcctcaatgactatattagtgtatatggtgtggcaggtatggctcaaatcgaatttaaaggtttagatactagacaagtacctgaaagtataatcaagaaaaatgcttttagctggggagccggtgttaccattaaccctatcgatatgctttctgtttccgttggctatgaaaacagccgttataaaatgaataaattaagtgataataaattaattattgatggctttattgcaaatattggttatagcttctaattattgatttaattaaattataaaaaaagcctctgtcattatcaataacagaggcaaattatttcacagacacactctgggatatttttaaaatacgagataatattattaaattaaatcttgataagtacctaattgatatccacgctcagcaatcgcttgttttaacgatgattgcgtcaacacctctaattccgttaaacgttggaaacagtaaccactcacacgtaaaggattatcaataaaagcaggatgtgtcatcacttcaagtgattgttcaccacgtgctttagcgtcatccagtgtctttaaaaacaaggcttggctgatttcatcaccatagaattgactatcaaaaccatcactactaataaccccttgagtattaagattttctttttgtgccaacagtctatcaacacgtatcggtaatgctttttgttgtgcaaactctgccacgatggggaaaatttgtttaaacatatgcacgtgatgatggctgtctatatggtcggggggacaaccaaacaactcaacaaagcgctgatattgtgcattaagctccactcgtatctcatctaaaggtaactgctcttgctctgccatttgccatagccatttacctaacaccccattacgcgttaaagaagggataggagacagcggctgtcccatagtcaatgtaaaatggagcccgacaccgagatgaggtagctccttgcataattgtgccgcatgctcaataccttcagcattcaccaacgccgtcgttgatgtcactatgccatgacgatgacattcaacaatgccataattttgccctctactcagcccaaaatcatcggcattgacaattaacaagtgtgccattctgtctcctttttatgatttattgagtctaaatcacttagtttgatgctgctaattgtgcaatcgcatgagcaaaattaggtaaatgcgctttgtgtgctaataacatctcacgagtcagtacttcagcatctttatcggaaagtaccagcggcgttaaattcatcgcaagtaatgcatcattaaactcaccactaatagccgcttgactggctgcgatctcaaaccctttgatagtatgaataagccccagcactttttcatcaaaatgggttaaacgtggatgtggtttggctccgtctttacctaaaatagccgtcacttcaattgcccagtctgcagggatattatcaatatgaccgtaatgaggaatattgacgtaatgttccgcctgtttatcgttataaatcgcattaatcacttcacaagcagcatcagaataataagcccctccacgtaattccaactctttaggtttaatatttaaatgtggatctttatacaattcaaacagttgtttttcgacttgctgaacaaccttagccctagcaccacctttatagtattcccccatttcaatggctaacatctctttttgtttaaagtagtagagtaaataagagcatggcaacagattaagagaacgaattagcccctcactaaaaggtaaatcaaaaatatttttcaccgatcctgcggttaacgtccccgaagcaactccttctaataattcagggaaacgggattgaccgttaacaatcacatctttaataaacaccatatgatttaagccaaacagatcaatagaaagcgtatcttgctccgttagcttaagcacatcagtaataaacattttcataccgataggaatattacaaacaccaataaatctcttaaaattggtatggcgataaaccgcttccgtcaccatacctgcagggttagtaaagtttatgatccacgcattagggcaaatttcttcaacatctttaataatgtcaaaaataaccggaatagtacgtaatcctttaaatagcccaccggcaccattggtctcttggcctaaataaccatggcttaacggaatggcttcatccaattctcttgcttttaattgaccaactcgcaactgtgtagtgacgaaatcagcctcttttaatgcctcacgacgatcaagtgttttataaatggttaaagggatacccgctttttttatcatacgctggcaaagcgcaaaaataatatccagtttttctttgccttcttcaacatcaaccaaccataattccgtgatcggcaattcatgataacgtttaataaatccttctaataattcaggtgtataactacttcctccaccaatggtgaccacttttaacttatgactcataaaatactcccatacagcacaatcatgctgttatttgtctattaatggcaaaattaaggcgtaaaaatccctaaagaaaataacgttattttcttctttctctctctatttaataaaaatcaattgatattattgattactttttacgcttaattataaattagttagtctctttaatactgtataaattctttctataactatttggtgtgagcgatgttatcttcttaaaagtcttaataaataagctcgggctactataacctgcatcaaaagcaatatcggtgacggagtaattcgtaatttctaattgttttttagcaaaattaattcgaatatcatgaataatttgcatcggcgttttatcataataacggcgagttgctcgagttaaatactcttgcgattttccagataattgcaccatatttgccaatgcattttccccaaatcggcttttatcatgcattccatcaatggcgtcttttagccataagggaatatcatcttcaataccatcatctctataatgtcgtaatctattcaccacattaaaggtgacaatttcaataaattcattaaattctgtatgtctgaaatttaatgagctaatcacggattcaatataagaaagaaactcattttttaatgcataaacttgagaagcaacaaaataagcgggcaataaaggaagataatgtttatcaaaaaaagctttgcttattcccacatttaaaatacgagttacaccaaagtcataaaaactttgatgatgcgagccaataggaataaagacaaaatcaccacgctctaataacacctttttaccgttaatttcttgataatagcgccctgttaaaacaatagtaaattcataataatcatgctgatgcaacccactgacgctttctgttttgttataaataaacacatgaaaattcttaccattaaataattggttttcatataccatgcgtatttcagcttgcgcttttaatgagtgcatcatcattcgccttactttattttttcatgtaactcgataagctctgtgacaagctctctggctaacatagatgtcattaaatgatcttgagcatgcaccagtaccaagctcactttcgttttacccaatccttgatcatcaccaattaagcgggtctgtattttatgagcttcatttaatgctgctcgagattgttccatcattttcttggcttgtgcaaaatcaccttgcttcgctttttttaacgctgcataagcgatacttcgtgcttgccctgaattaataattaaccccatgataatttcttcaaattcatcatctgtcgctgagctatcaacgcaattctcaatatctaacatcattccccctctttggtgcttagctgtgcaaaataagcgctgcacagccattgtctattcgttaaaatttcaatgcattagcaatatcttcttcactttcttctttatcaatttcggtttgtgctttattcgaaataatcacaaaaggcagataaatcagtgttgcaacagctaagttaaagagtgctaataacagtgcggcaatactgccattggtattaaaaaatgcccctaaccctgttggcatcgtccaaggtgcaatatttgtgaccggcggaataatcccaaggtaataagcggttacggtaatagcagcaaggattggctgaataagaataaaaggaataaacatcactggattcataatcacaggtaaaccaaaaataataggttcattaatttggaatagacccgcaggtaatgctaacttcgccacttgacggtgatctgctcgacgcgatgcaataaagatagctaatatcagacctaacgtcgcccctgttcctcctaagaagataaacgaatctagcatcggttttgcccaaagatggaacgttttgcctgcagcaagtgccgcctcaactgaaccatactcggtataaatagagacgttttctaatgcccaaggtgtcataataccgctatcaagtgccgccagcgccagtgaaccatgaataccaaagaaccacagcaaagaggtaaaaataacgtaagcccacccaacaactgatcctaacgaagccaatggcgttgaaatagaatctaaaatgatttgatggaaatgtgtaccgtaatgcgctaatccccaagagataattcccataattgataaaataataaaaccaggaattaaggcagaaaaagagcgcgaaacggaggcaggtacactatcgggcaaacggataacccaattacgacgcactataaaggtaaacatttcggcaaccacaaggccaataataatccctgagataatattggcacctcctaaccagttcgcccccacagcataagcgccaccagcgtcataaggtgttaccgtcataaaggcggcgatagaaagtaatcccgccgcaatagggtcgacttttctctcttccgccaacgccataccaataaagaacggcgccatcaatgacattattcccaacgtaccgttatagacattaccacctatggctttgaaaccattaagtgtttcaattgttgaggcatctaaacgaataccaagagagtaaaaaaaggagccctcaccaaaactgagaaaaacattattgataagtacaaacattgccccggcaagtgttaatggcattaaacggataaaaccattttttatcgcattaacatgaggttgctttccaattttaaccgcaaaaggaaggagtaccttttcaagtgaaccaatgactttactcatagaaaaatacccttaaaatgccgctaattgctcggctagctgaaaaattcactctttgactggaataaataaaaataacaataaaaaaattaattagttgttgctgatgctttcttaatggcggctactgctgcttttaatacacctaatccatccactttcccatataacaatgaatcaatgacttcgacaggtttattgggtaataatttttgaatatcagcgagcatccaaccaatttgtggccccaataaaacgacatccgcttcttggcctttttgctctgctaatgtttctggaaaagcttcaataataacgggtacatcatatttttctgcttgtgcacgcatttttgtcactaacagagatgttgacatgccagcagaacaaaatagataaatatatttcttttgcataaaaccctctcaaattggccacactctgccctagagataatgctactttctcatgtgcattgattaagatgtcagtacagaattaaagtaaaatttagcaattaagattgtttctgattgaataaagtatacgcaatgatactcactaacgatattttttactgacacataattgtctctgattgacctagtgtattgaccctcttcacaaattaagcaaaaaatctttagcattgtttcgcgttacaaaatttgtccattcttctcttcacatgatctgatgcaaagattcagcacaataatataagttaatcctttattattgtgagaatgtgaattagtatcattactctttagttttttggtataatcattgtttcctttgtgaagctcattattaggtcacagctagtaaactgtgctatttcatatcgcaacaatatgggaaagagaatgtttaaaaaatcattaagcccactgttcttattgctgtcttctctggttatcgcaggttgtgataacgcacaagatacctcaacaacgcaatccacagagaaacaaactctcactatcgaacatgctcaaggcaccactgagatccctgctcacccacaaaaagtggttgtgatgaacatggaaacacttgatattattgatgctcttggcgtacctgttgttggcctaccacaaacaaacgtccacttacctaaatttctagagaaatacaccaacgaaaatgagtacatcaacgaaggtggcctgtttgaaccaaactacgaaaaactcagtactactgcccctgatctgattttaacgggtagtcgtgctcgcgatgcatatgccaaattaagtgaaatcgcaccatccatttctatggatatcgacagcacacgctttattgacagcctcactgagcgtacaacgactttaggtcaaatttttggtaaagaagaacaagctaaaaaattattagctgacttcaatagcaaaattgatacggtaaaagcaaaaaccccagatgcgggtaaagcaatggtcgtattagtcagtggcggtaaaatttccgcttatggcccaggctctcgctttggttttatctacgatgtattgggctttgaacctgcatatactttcgatagcccaggctctcacggtaatattgttaactcagaactactgctaaaacttaatccagactggatgtttgtcattgaccgtgatgcagcaattggtcgtgaagattcacaacctgcaaaacaagtgcttgataatgccctagttagaaaggttaatgcatggaataaagaccaaattatctatcttgatgccagctcgatttatatctcaggtgggatacaaacttactctcgcttaatggatacaattaatcaggcgttggatcaaaaaaaataaagtaactgaatgaaaacgttccatttatcattggggataggacttatcgctatcctctcaatgatcagtctatttatcggcgcaggagatatcactcctgcttcgctttttactgatcccgatatgcgcgatatcttctttattagtcgcgtaccaagaaccctgtcattattacttgctgggggcgcaattagtgttgctggtttaatcatgcaactgctcacgcaaaaccgctttgttgagccttctcttgcaggtacaacacaatcagccagtctcggtttattagtcgtgatgttgcttttccccgcggcaggcattttcaccaaaatgatggtagccactgtttttgcacttttaggcactgtgttatttatgttgttgctacagagaattgccttaaagaccgcattaatcgtgccacttgtcggtattatgctaagtgcagtgataggtgctctaaccatctttcttgccgtctattttgatttactacaatcactagatgcgtggactagcggagacttctccagtgtcttacaaggtcgttatgagctgctatggcttgtcggtgcccttgcattaatggcgtgttgggtcgcggatagctttaccgtggcaggtatgggacgtgaattttccatcaacgttggacttaactatcgtaaagtgatgattatcggtttatctattatcgctttaattagtggtgtggtggtgtctgttgttggtgctctacctttccttggtttgatcgtgccaaatttagttagcctagtgatgggagataatattcgcaaaaccatcccgtgggtatgcttaagcggtggagccattgttttactctgtgatgtgattggtcgcctgatccgttatccatttgagatccccgcaagtgtcattttaggggcggtaggtgctgtgatcttccttttcttactactgaagcagcaacgttatgcaaaaagttaattcatccatgattagcaaatatactggcgctgttcaacctaagaaagtgcgcctctcacctatggcgcgtatttggctcttacttggcgtctcattattagccattgcgctgtttatgacgatcaacctaaacggtaatatctcttatattctgacacaccgcgcttatattattctgacgatgatcatcgtcgcctttgcggcaggcgtttctactatactgtttcagactatcgccaataaccgcattcttactccttcattaatgggcttagaagctctgtttgtattgctacaaacgctctttatcttttttgaaggggatatgcccgcctcttggatggccaatctgacgaagttctttttagagtcggccttattagtgttattttcggtggttctatatcgttggctatttagttcagtacgctttaatatcaatttagtccttatgattggtattattttaggcaccctatttcgtagcagtgcaacgctattacaacgcctcatggacccaaatgagttttctgtcttacaaagccgtatgtttgcgacatttactcgagccactcctgatcttatcttatgtgcattagccattattgtcgtcgtcggcgtattactttggcgtatgcgttatagttttgatgtgatggccttaggtcaggcgaatgcgattaatcttggtattaattatcgtaagcaaacgacttatattctattacttatctctgttctggttgcggtatcaacagcattagtagggccgttgacatttttaggcttaattgttgctaatctggcttatcatattagtggtagcagtcagcaccgctttttaatgcctgtggcattcttattaggcactatcgcactgattggcggacaattgattttagagtatggcttaaaaatgacaggtactctctctgttgtgattgagtttattggtggtatgttctttatttatttggtattaagaagactttaatatgattgaaatcagtaagatatcaaaacgttatcaagacacaacagtgctcgataatattacaacaaccattcaacgtggcggtattacttcaatcatcggacccaatggtgcgggtaaatccaccttactttctgtaataggccgtctactgatgccagaaagcggtatggtcagtgtgaatggcatggatgttgcggccacagagagtgatgtattagccaaaaacctttccatactacgccaagaaaatcagtttgtgagtcgcttaactgttgaagagttagtcggttttggtcgctacccttatagtaaaggacgcttaacgctagaagataagaaagtgattgatgaatcactcgattttcttaatttgactgaatttcgtcaccgttatcttgatgaattatccggtgggcaacgccagcgtacttatgttgcaatggtattatgtcaagatactgaatacgtgatgcttgatgaaccgcttaacaatcttgatatgaaacacgcggtcattatgatgaaattactgcgtaaagccgccgatgagctaggaaaaaccattatcatcgtcattcatgatatcaatttcgcctctgtgtattccgactacattttagccatgcgcaacgggcaactttactatcatggctcacctaaagagatcatgaaatccgatattatcgaagatattttcgatactcccgtcgacgttaaagagttggatgataagcttatcgcgatgtattactaatattgctatttcaccgaaagccaaacagcatattgttacttttaaacaatatgctgtttaattacttcgtagtcactgtaaccagttcagaatcaatatcgctaaaaatctcttcccactcattatcatcaatatccattaaaccaaaataccgtagcaagaaagccccctcggtggctaaaaaagccagtctcgcccgtttcccctctactgttgtggtatcgacacccgctaatctttgctgataccacgctttagtactttgcaaatattctggcgtttgcagtaacgcagccattaagctggctcctttggcaaaagagagcttatcgtgatcatgagttgcatgaatatgtgctctaacgcgattattggctgagttatcattggcaaccacctgattaaatcgcgcttcatatcctccttcccaatgttcaaacatggcatcaatcatcgcttctttactattaaagcaatattggacaccacctttagaaatccccatttttttggccaccgtatcgatagtcagagcggcagccccttgctccatcacgatgtcaaaaatagcctcaagtaacttttctctatcaatcgttctttggcgtcccatttaaaaaaacctcttttcaatacgaccgtatggatttaaaattattattcctagctaaatataacacctaagataaccactgagactttatatgataaaagattataagcgttggatagtcttacttttagtatcaagtatgctgtttctaattgttgttgatgttaccgtactttataccgcactaccgcgtttaactcatgatctcaatgcgagcgcctcagaaaaactatggatcatgaatgcctatccgctgattgtcgcagggctgttgccagcagcaggtatgcttactgatagaataggtcataagacgttatttattagcggattacccctttttgccatcgcctcattatgtgcggcttattcccctagtgccaccagcttaattatttctcgtggtttcttggccgtcggtgctgctatgagcatgcctgcaacgttgtctattgtgagacaagtatttactcatccacaagagcgtgccgtcgccatcggtatttggtctgctgttgcttctggtggcgcggcattagggcctttaattggtgggttgctattaaaccatttctggtggggctcagtctttttgatcaatgtccctattgtactacttgtgcttcctttctcgatttggctaattcctcacttttcgggacaacggcagcataaaattgattatttaagctcaatacttattttgattggcttagtcagcgctatttataccttaaaagagataggtaaggcttatacacaatggaatgaagtgatcatcgccacccttattgccattatttttctcacactatttgcgcggcgccaacgtcgtcaaacgcatccaatgattgattttagcctatttaaaaagcgctatttcagtgtcggtgtggcaatgtcgactctttctatggtgatcatcgtgggtattgaatttctgctaagccaacgcttacagttagtcgccggctttacaccattgaatgcagctttagtgattttacctatccctatcggctcagtattagcctctcctttggctgggttttggctagcgcgtttaggtgcagtgcgcttaattattatcggattcgccctaacattaatgggtaacttatggttaattgccatttcaaactcaccgataatgctaatgggtagcctctttttgattggctttggtttaggcattatttttaccaccgcatcgacctctattatgctaagtgtcgacgataaacaagcaggtatggccgcttctattgaagatatcgcctatgagttgggtagcgtgattggcgtgacatttatggggagtttaatgagcactctctataccttaaaactaactttaccggatacgcttaacgtcaatagtgtcgtttatgatagtttagatgaagcacttattgtcgctgaaaagcttcccgaagcagcggcgaccctcttaatcgcacaggctaatagtgcgtttgaatatgccttttctatcgttctgatcgccacagccattgtgactacaataagcttaattgcactcccttattgcttgcgtaatgcggtaagagaaaacaagcccagccactaattcaagctcatagaaaacgcgccgttatggcgcgtttctcacaaaatcagaaggtgattgtcccatctgctttttaaacatagtagaaaaagagctagcgctgttatagcccaaatcaaaagccacagcggtaatgctatgccctgataaaatttgcgtgagtgagtttaaaagacagacttgctgacgccattgtgaaaatgccattcccgtctgttggcggaaaaaacggctaaacgagcgttcacttttatgtaatttctcggcccactgctgaggtagagcgtcaattttgggctgacgaataaaatcgcgacataatttagctaatttactgtcctgtggaataggaacaaagaaaggcaaaggttctgctttcgctaactcatataagataagttgcattaaaataccatcgcgcccttttttatcatattgcgcaggcacatcaacggcttcaagaagtaattgacgtaaaagcggtgacactcttaacacttcacactgttgactctgacgaggagctgccgctggctcaatatataaacttctggtactcacatctaacatgcgtgtttcatgccccgtctgaggagggatccacacaccacaagagggagggataacccattccccatcatttgtgctcacttcaatcaatccggtagcgggatataaaaattgcgctcgtcgatgtcgatgcgtttctaatagcgtattaggcagataatctgtacccagcgcaatcacatctctctcaaggagatcaacactttctaacggcacatttctcacattaaacctacttttttatctttcttgctgatgagcaaatctggtcactatcacattgcaagatggcgaattaacccctttcgctatttagccaccctatcccgttaacagctataaaacttactattaacactgtcaataaataggccgaaattctaatgtcattgtctgatcttggcatgttggaaagcgattaatcctctactatccctcttgcagaggttgtttcaggcgctctgcaacgcggtatgcattcaataataatgcagcggaaaccagatatccccatatcaatagtctagaaaacgcatacacatctttatatcaagtatcgggtaaattggcttccgcttattatatctaaggtagcatttatatgagcaatcagtccgatcatcatagtattaagccaatttccggtgatataagtcgtcgccattttattcaagcgagttcggcattagtcacactgccctttttttcctccaacacgatggcggcaacacaagatcatgcaatagctgaaaaaacgattgacgccaaagagagtgagcgtgttgtctctacctgtagtagttttgactgtggcggaaaatgtgatattcgcgcgcacgttaaagatggcaaagtgacacgtattagcactcgacctgacgccgatttagatgaagagatgcctatcatgcgagcctgtgtacggggccgtggttatcgtaaatttgtctatcatcctgatcgattaaaatatcccatgaagcgagtaggtaagcgtggtgaaggtcgatttgagcgcatcacttgggaagaagctacgacgcttattgcacaaaatatgcaacgtattaccaagcaatatggccctgcctcacgttttgtcagtttaagcaccggggtgactggtggcattttttctggtgctaatatgctacgccgtctgtttaacctaactggcggctttctggagaattatcactccgtgagtaatggtaacacccttgccgttaccccttatacttacggtacagccgctagcggaagtacattagatacattagcaaatacccctttagttattctatggggacataatcctaatgaaactatttttgggcattccaatcattacttccaaaaaatgaaaaaaaacggcactaaatttattgtcgttgatccacgttattccgatactgcctcttctttagctgaccagtggatcccgctgttaccgaccactgataacgcgatgatggatgccatgatgtatgtcattgtcagtgaaaacctgcatgatcaggcctttatcgacaaatacacccttggttttgatgagcatcagatgccagaaggcgttggtgaaaatgagtctttagttgcctatttaatggggaagaaagacgggatcaagaaaacccctgaatgggcggagcctatcactaaagtacccgcagatactattcgtcaattagcccgtgaatatgcttctacaaaaccggcagcattaatccaaggttgggggccacaacgtcatatttgtggtgaacggacggcacgcggtgcgacactgttagcgactattaccggcaacgttggtgtacgcggtggctgggcggctggctatggcatggcattaaactctgagttacgtaaaaccattgccggcccaagtttattgaccaatcccgttaaagcaaaaatcaatatcaccaattgggtgcaagcgtgtgaagataaaaatttggtcacaccacaaaatggcttactcaatgccgagaaacttgatactgaaatcaagatgattttctcaatggcgggtaattatatggtgaatcaaaataccgatattcttcatgccgctaaagtgcttgaagatgaatcaaaagttgaatttatcgtctgtagcgacctctatttaacacctagcgccaaatatgcggatatcttactgcctgaaaccagctttttagagcgctggaatattggaggcacatggagttatggcgattatattattctgtccgaaaaagtgatagagccagagtttgaacgtcgtaccgactacgattggttatgtgaagtggctgataaactgggggtcggtgaacaatttagcgaaggtaaagccactgatcgcgactggattgaatatttagtcaatgatgccagtattaaacgtcctgaagatggtattcctacctttgatgaattattggttaaacgtcgtcatctgctaaaacatcgccctcatacccaaaatgttgcgtttgagaaaaatattcaagatatagaaaataatccatttccaaccccatcaggaaagattgagatcttctctaaacgcttatatgagatgaataatagcgagatccccgcactttctcattatgtgcctgccattgaagggcccgaagatacgttaacagataaatttccactacaactcatcacgtggaaaggacgtaaccgcgcaaactcaacacaatttgctaatccttggctgcaagaagtacaacgtcaagaattatggatcaacccattagatgccgaagatagaaatatcaaacaaggcgataaagtcaaagtctataacgaccgtgggatcaccttagttcccgtcaaactcacacaacgcattatgcctggtgtcgttgctttacaagcaggtgcttggtggcaaccagataaacaaggtatcgatcaagggggatgtgccaacgtcttaacctcatcccgtagcaccgcaatggcacacggtaatgctcaccaaactttattggtcgaggtagtaaaagcatgagtaaatttatcgtttatcccgcagtaagcagtaaacagctagggttttatatcgacagtgctcgctgttcgggctgcaaggcgtgtcaggttgcttgtaaagataaaaataacctcgatgttggccgcaaatttcgccgtgtatatgaaatcactggtggtggttatagccgtaatactaacggtgcattaattaataatgtctttgcttacactttatctatctcttgcaatcattgcgatgatcccatttgtgttaaaaactgcccaactaccgcgatgcataaacgcgaaggtgatggcattgtgatggtagatactgacaaatgtgttggttgtggcgcctgtgcgtggtcttgtccttatggcgcaccgcaaatggatcctgaaaccaagcagatgtcaaaatgcgatttttgtatcgacttacaacaaaaaggtgaacagcctgtttgcgttgcgacctgcccacttggggccattcaatttggtccaattgatgaactacgtgaacgctatggtgaagttaattatgtcactggtttgccttctcctgaaataactcatccaaacctagtgatcaaccctcaccaaggggcaaataatgacactataaataataaaggagaaataaaatgaatgaatggtcattattgattttcacctttatgatgaatgccactattggcttaacactcataacaggcctttttgcacgccgtcttgcacattatctcagtgctgaaagctattatcgctttatgttactaaccttattggtgatttgtggattagccggtttaggctctattgcctccattactcacttaggcgtgccgttaaatgctccgaatgccattagaaatgtcttttcagcttggttaagtcgcgaagttgctgtcactgccatttttgtaggatgtttagggatcacctttttatggctatggcgtaccagtaaattttcgatgctgctatttggtgcaagccttctgattggtctgtttgacatttattgcatggcatccatttatcgccatacttccattttaacatggatggataacaacacttatgtgatgttttttggcgcgatgctcacattaggggcaacaatattctttttgctgctaaagatattgcagcgtataggcaataaattagggatagaaataccatcagcccctttccctatccgttggaaatggcaattgtgggggatcatggcatttagtttaattggccgattactctatcaacctttttatgaacactatttaactcgtacgctctatagccaaacatcggtaacctttccgttatcacctattgaagtctattactccattggcccattacgtatgaccagttggatcttagcaactttggctgtattggtgtgtggctatagtttagtaaaatatttgatgggccaaactcagcaaaaatcaacggagtccatttttgtctatggcggtatcatggcaattattgcagaatttgctttgcgttatgtgttttattcaattcactaaatcacgatcagccagttattgaagatgacaattatcaggggaattattagcccctgattttttatcaaagatcatcgttcaccctgagtatcaatcaacagacgttgattaatataatcaatcgtttcttctattgtcataatatgattaatcacattagtaataccctgaccaataataatctcagcttgccttaagttaaataatttaccattcggcactgatgattctcgtattccttgattaatttcctgataagctagtgtcatccatggataacggtggctaatttcttggttatgactaaaattttcatggttactatttccacccaataaaattaagtgatccatcacaacaggagaataaagccaacgataaaacagttcagcgtaagatgattttctactgtaacgcgacaccccaagtaccccaccccctaattgtggtacaccacccggaacgggagcaaaaccaattttaggtaaaatatcgctatgtgcgacatcattaaataaattcatataagagataagcattgccagatgaccttgctcaaattgtctgaccgagccactccaccatttatggttgatattttcggtgatcgacaactgatgcaaataatctgctaatacctcagcggccaagggcatcgctaagcgcggaatattatcactaccgattaaacgcccacctttagcgtaataacgtaataagtattcagttgcgattaatcccgcacttcctaatgtggttgaagctcccatcggacaatgagcttgcccggcttgatgcaactcagtaaaaaactgagtcacattatcgtactcttcaaaggttgtcggcacagttaattcattacctgttttttcgtaatacattctttttaaaatagtatcttcaaacagatctttacgataaaacagtaattgagcgctagcatcgaacggcattgcataagcgacatcattaaccaaaccaaatttttgttgcgtaggtaaggaaaagtgactcaataaatcagttaatccatcaccaattttatctaatggtcgcaatattcgctcagcaaaccatggaaaacacgccatatcaatacgcaacagatcataataagggtgtaaatgaagttggcttaaaatttgatagacttcatcataaggatgaatagctaaattcaccttgataccagtttgacgataaaaatgaggaagtagtttttttaatgccgttgttgaagggcttggcaacgttagtaaattaagactaatttgtgatttatcatcactcattactgctggtgttgccgtatacagatatgaacttcgatttgcgacagatacattattatttttgtactcatgcggctctgcgattaatagtgcctcagcgacttccaaaccaagctgagcatagttcattggaaaacaatataacccttttattaccggcggaatattatcacttagagcaaagataataggacaatctgaagaactgccaaaatagcttgcttgtgttaaatagcgagctttctcaatatcttgtgtgacaaagatatcggggactggctccatagaaaagaagtcaaaagcaattttataactctcttcatcagaagcgctaagtatgacacattttttatcgggtgcagtttgagaaagccgtatttgcaattgattagcaaaaacctgactatttaattcatcttgattatcgccaaaaatccccaccaccttgccagctgtttgtgccacttgctggcaaattgactccgccgcttgtgcaaaatctaacgtaaaaaaacgttgtgcattgaggggtttgtgataaataaagataatttgtgaaggtggaagttttaacgtgtcaaaatagtatttagcatctttaagacaacttacggtgactacttgcttatagccacctgcagcaattttttgtagcagatcacgctcagtggtctcaagaagatctgttaaaaaaagatcgtagctgatctctggaaaattaacgatcgactgtctaaaagcattaaagaagatcgcatatttttcagaaaccagttggggtaataagatcgcaattttatggcttctattggttcttagtagttgggcttgtgtatttaattgatagcccatctgtttagcagcttgatagactgcttcaattttttcaacacttacatttccacgtttattcaatacgttagataccgtaccatgcgaaacacccgctagttttgcaatgtccttgatcgtcgccatttctcttctttcacctctatttccaccttcactagcatacctgaattatttatcacgactactgataattgatttgaacgttccacttacaattagctgataaatcaatctattaaaaattaaagataataaataattatcaataccaattaaaataaatatatatactaatcaacatattagtaaataatatttgaataagatcactgatctgatcttcatttattggcaaataacacatgtcattttattattggaacgttcaaatttgtttgtaacctacaaatagccaacaccagaaaattaataaaatactaataaacaataagataaggggatttattatgaagcttcattttttagggacggctgcctcagaaggcataccgaatcccttctgccgttgtgaacactgtctgaaagcaagaaaattagccggtaaagatattagaacgcactcttctgctattgtggatgacattatgttgatcgatgtctcccccacttttagttaccaactgatgcgtgatggtatggacgcaacacattttgaaagtttgctatttactcatactcatcctgatcattttaatgttggtgaactatttagcagaatggaaggctatggttttgaaattaaccatcctttacatattttcggtaacgatcgcgctatcaatggctgtattgaagtattaccaggttatacgaaagagcgatttgcatttcattgcttaatccctttcgttacggtcgaaagaaatggttataaaattacgccgctacttgctaatcatgcaaaatgggaactttgttatgtgtatcatattgagaaagatggcaaagctattttctatggccatgattcgggttggttcccagcattaacttggcaatggttagaaaacaaaccgcttgatattgttgtttttgagtgcacttatggcttaaatggaaaagatcgtacagataatcatatgagcttagaaacggtttttgccgccaaagaaaaactgcaacaacaaggctgtttacatcaagctacacagattgtcgtttcgcatatctcacatagcggtaaattactgcatcatgaattagaaacggtctgtgctcctcatcatatccgtgttgcctacgacggattaacgttagaaaccaattaagaggggtacgacaatggatatgaaaataacttctcgcctacttattatgatgtttgtgcaatatttcatgcaaggagcatggaatatgaccatgggactcgtattaagtagttatggtatggcaagcattatcggcaatgcttatgccttattaggtgtcgcgacaattatctcccccttatttattggtatggtcgcagatcgtttctttgcttcacaaaaagtcatggggatacttcatttaattaatgccgtcgttattctctgtgttccccaatttattgaagctcaaaacagtggcatgacattatttttaatttttattattggcttattgttttatccaaccactgcgctatctaatagcattagtttctcccatattaatggggttaaatatttcccaattattcgcgtatttggtacgtttggttttatggcaattggttttatattgggtgaaatgggcttctctggtagcacaatgacttggtatatcgcttctgcagttggtgtattactcggtttctattgttttacattacctaatacgccacctaaagcgaaaggccagcctttctcactacgcgatattttatgtttagatgcattgtctttatttaaagatcgctactttgctattttgatgtttagcatctttattttaatgatccccaaaacagcttattctgcttatattcctgtctttattaaagcattaggctttgataatgcagcttctattatgcaaatagggatcgcttgcgaagttctgtttatgtttgttttgtcattcttcttaatgaaatttggcttcaaaattacactactgctaggagccgtgagctggatcatacgctctatgtttttctcttatgctgcagtaaatacagagctttactttatcgtcatcggattaatgctacagggattatgttgggatttcttctttactgcaggagatatctatgtcgatcgcaaagcaaaacctgaaattcgtgcacaagcacaaggtctgcgctttattgtctctaatggtttcggcttactatttgcttccactatttgtggtcaaatctttaacacaaccgtaactgaaacaggtgatgcagcattaccacaatggtcaacattctgggtctatcctgccattgtagcggcggtggtaaccctattctttattttcttctttaaagatgatgtttctaaaaaaagaaatagtgaaaataaagaaacatcacgaggaattacagcaccttaattttaaaataaaaaataagccaacgtcaggagcaaaccatggatgcattaatacagtttgttgacactattggcccattatcactatcaagtattgctaaattactggccgcctttatcttaggcggtcttattggcttagagcgtgaatcaaagggaaaaccagttggttttaaaacttgtgtcattattgctgttgccagttgtttattaaccattgtctctattcaatcagccgaatattacgccaatatttctgacaatattcgcagtgatcccatgcggttagctgcacaaattatcagtggggtcggctttctgggcgctggtgttattttacatcgacgagatgatgccatttcaggattaacgactgcggccattgtttgggcatctgcgggagtgggtatcgcctgtggctccggcttttattggcatgctatcgttgtgactttcctcttttttatggctattaaactgagcccacaagtagtgctgtttcaaatgaataatcaacgcttaggtaaaattaaagtgcgaatgctatttactcatgaaagtggtgttcctcttttaattgactatttaaaaagcaacaaaaacgttattgaaaacctgactattcgtgatattaaaaaggagcgcgttgaagttaacttaaaactacttgtgcgacaaaaaataaccttaccagagttttattgctcattaaaacaattacagcatgtacattctgtttcgctagatcattaaattaattctattattgatagagaaacaaccatagtgcccctatattcttaaataggtggcactattataatctaagtaaaaacagcttggttattggttctctttaaatggattacccatcttattaagatacatcatgccaaaaatcgttgatgcataatcagtaatatgtcctacatcacgataaaccggcactccttcaatatctgttaagcaggtatctttatcgcattgtacatctttaggatcgataataattaagcttggatagtcctgttttaatttagcaaataattggttcatccatgtattcccctcacctttatagtttttgggattacagttgttatcagcaaaatcttttcttaacttggcattttcataaaaacaggtcataaaaccacgaggcattgaataaacggtttttataaaaacaggtttggctccagtagcaacaatgatatcaagcgcttcacgcatcgatttttccacacgttgacgagatgcctcaaccgttcttttatcacctattttattaataacatgatttgaggcgtaattattccaaacctgtccaaaaatcacataatcaaaccgattatgtttaataatctggtaatattttgctgtttgatcataacaacgttgataaaccgtattcttatgattagaccaatcataaagataaatattaggaatagtaatgcatgatgaagttgcttgcgcatagacatcaagctcagcatctttacctaaaatatccataaatccccaaaaatgattagcatgggaatcccctaataaaaaggcttttttctggctacccactttaccaatatgacacatcttatcaggatcagaggcttgaaaattcatacaattacctcgattgggataatcgaattgattgagtttgttttctaaattaacgtaattttgcccaagccttactccaaatccatgatacttttcatttaatgcatttaatcctaaagccaataaaataggtataacaaacaataatgttatcgaatatttaaagttcaaacgctttcttctaaacggtttttcaataagaaggtaagaaaaaatagagagtaaaaatgttaatgctaaaaataaccctttttgtatctcggtgttaaatacgcctatataacgcgcaatagcaaataagggccagtgccataaataaagtgaataagataataatccaatgatcactattggctttaatgacaacactttttgaataatactgccatgttgtcctgtataaataattagtgcaacactaagacaaacatataacgtattgaaattcggataaccagcaatcacatctttttgaacggctatccaaaagataacccctaaggcgatgagactaataacactattaactctttgattaatgattacttttacgggtaaataagcaacacaagcccctaacataaactcaaatatacgcgtactaaagtaataataattcttaggttgatctttttgataaacaagcaccaaggagaaagaaattattgtaataaaaacaataaaataaaaattatttattttctctttatgattaattttgtgaagaaaatagagtacaaaaggtaagaatagataccactgccattctattgctaaagaccatgtatgtaataacggtaagaagagtgcatcttgcgctgcataactagtcgttgctcttgcaaaatatttgttagacagaaaagctgaagcatatttttcactattagtgatatcaagataatcactaggtagatagaaaatacctgaaattacaagaactgctactaaaacaaaaagatagagtggctgtaaacgccataatcggcgaatataaaaatcaccaaatgaaaaatgaccttgtaaaagtgatgttttaataattaacgagatcaagaaacccgagatcacaaaaaagatatcaacaccaataaaacctgatggtattaagcgattatctaaatgaaagaagataaccaaaataacagcaattgctcttaaaccgtcaatatcagcacgatattttatattcataactcaatgtactatccaaataaaaagaattgctggattatacatcaattaaaaatatcactttagttgtaaagagaatatttttaatattgatataaatgatttcaaatatctactgttactgttgattaaactctatcgtcttatttaacaatatctcagacgatagtgagcctttgctcaccacaaatttaggatagttaatgctggttttaatattgattggaagtgataatcgattatgtgctaaaaattgaaaaagtggtgttattttttctgatgacacgctttcctgtaagcgcccaagcgtaatgtgaataatatttttatgcagatgatgatcaatggggatttgctggtaaacctgttgtctaaactgcgttaatgtttttgatacacctattaatatcacgcttccattagtcgttaaaataatatcattaaataggatctcaatctttcctatcttattaaagatattcgttattttttgacaccaagccagtaacattaatttctgaggctcaaataacgctataggttgattaaaaatggtcaacaaagtgcaatgaagttgtaattgtggagtcaccgctataaaaggaaattgctgagcaatttgctgacaataaacatctaattgttggctaaaagggataaaattctcatccacctttggtttatcaataatgagctgccccgcatttaaactcaaatcgataatatcttcattattaatctgttgtaaccacttttcattgcgcgataattttttaactgttgcttgggttaaaaatgaataggccatcgataaacctcggtaacgaagattgttattaatacattgaattgaatggtacttaaaatcaagtcataaagtagataataaaaaagtggctctcaagcgaaagccactgtcacatccaatgggggagatgttaaaggataggtttatctacaatgttatgctctaagcaaaacgcaatttatgataagaaatttgccgccttaaatttcgccagtgcatctgctttttgttcagcagtcagtgggcgtaaaggacgacgaggagcgccaacatcaataccatgcaattgcattgctactttgcctgcagcaacgccaccgtattcgactaaaactcgaataatagcgataactttatccatgcaatctgccacaccttggtgatcaccctgattaaatttctcaattaactcaagatataacggtgcagcgtagttataggtgctacctacagcgcttaatgcaccgcaagctaatcctgccggaataaattcatcaacgccaaatggaatatcatatttacctccctctacccgtaagcaacgctgaaattcatacatatcaggggagttaaatttcatgccagataaattggggatcactttaccagctgcttgtaaaaacttttccatatcaatgcttaatcctgacatggtggaatgataatagtagaaaccttttgagggtgcacttgccgctgctaaacgacaatattccactaaatcatcaacatgactaggtttaaagaagcaagggccaatcactgatgtggctttaatatctaatgtttcagcatgacgagcaagttctaacgtatcagcaatacttaatgcaccagtatgaataataagatcaagttgtccctgactcgctgtaacccaacgttcagcaacttttttacgctcttcaaccgagcaatgtataccttcaccagtagtacctaagacataagctcctgttacccctgtcgtaattaggtgcttagcaatatcatcaataacagggtaattaacactaccgtccgcagcaaaaggagtatgaggcgcggcaatcagtccagagagtttgttcatgatcacttcctatggagattaatttctttattaattaacttatggagtttaactctatattagagagcgactagtcataacgcaataacgaaaatagctctgaaggaaagagaaaggtgaaattgtgatctttagctactttctgctcaagatactttaaaatagcaataaacttatgctgaatgcgtctgttttaacgcattgagagtacgtaatttctgctcttttactgtttcaggcttagcctgaactaacaaggtataaagcaaatctaaaacaaaaagttgtgctgtttttgtgccaatagaatcgccttgtaatttcccttgtcgattaccattaattaaatgatgatctgcatattccataatttgtgagcctaaattatgcgtcaatgcaatcgtgcttgcgcccgcttctttagccaatttcaatgcatgaaccgtttctaatgaattacccgagtgactaataccgatagcaacatcaccagattttaataatgaggcttgcatatacataaagtggttattagttacggcatcaacacgataaccaatacgcataagtttatttttcagatcttccgcagtgatccccgaagagccaacgccgcagataaaaacatagtttgctgataatagtgcattgaccgccccttgcacttgctgcatatcgagtaaatttaatgtttctgataacacattatttattgttgcttgcaattttaggccaatagtatggatatcatcttggtgactgacttctgcatcaaggattggcgattcatcattatctgatgttgccatttcaatcgccaaatccattttaaagtcttgaaaacctttataacccaatgtccgacaaaagcggacaaccgtcgcttcacctgctttggttgcttgagagagttgggcaatagacaactgagtcacttccgtaggatggaacaggatatagtctgcaatacgttgcgatacgcgagttaagctatttttcatagcgcctagcgtatcaagtattttacccggctttaatcgagttgttgcctgttctgtcatggacattatccttgcttgcagcaaatacacgagaatagaattttgcccacaagagtaccaattccaacaggttaaaaaaagccttgttaagacaataatgtgataataacaaaacgccttattctcagtatcactataactccaactaactgatacatgagaaataaagcgttttattaaataataatgattagtgagttaacgcggcaacatctagtttaataaccactttctttaatgtactggcctcatttttctgcgcaatacctggcttatgtggctcataaggcataaaaatggcgaacatatttggtgtaagggataatgtttgacgatgtatgatgttatcagtcaactgataatcatccgtttcattataaggtgtcacatcttgtgccgaaccttgtattccaaaatcaattgtctcttcaccggatagtaagatctgaatatcgatataacgctgatgcaattcggcttgtttttgctcacgaggcacggtttcaaaagtcataacattcataaacaacgtctcaccatcaattttatagctgcccggtgcaagtgacgcgggatcaagtgctaatgctttttccattgcatgacgtaacgctggattcatttctggcatagtcgccaaatcagataaatgtccaaataacatagattattccttcttagttctctgatgtttcactgtcatctaaggaaagctgttttgctggtgcgaaaagtggtgccgtaatggttcctgcaatcaccactgacattgaaccaatgactccatagaagaagaagttaagatcactgccataacgtgcagccaatactgcaataatactcacgatgatcccaacaacggcgctaccggcattagcacgttttacaaaaattcccagcataaataggcctgtcattggtccgcccataagacctataaggctattaaatgcatcccaaatttcagcttcatcggataaaactaaccaaattgccgctaaactactgaatatccctgccacaataataactaactttgcgactttcattttttgttcaggactaggggatgatttactaagacgagtataaatatcagaattaaagcaacttgaaatactatttaaactactagaaatacttgattgtgcagcagcaaaaatagctgcaataattaaccctgcaataccgataggcatttccgtcacgataaatagtggtaaaattccccccgtattaaatcctgcgggtaataaacttgggttttgttggtagtaaacaaacaatgcagagccgatggcaaaaaagaaaataggaataatagccactaatttagcgttagttatcaatgtacgtttagtttctttaatagaatcggtaacgatatagcgctgcacaacatcctgactagcagtaaattgctgaatattggcaaataaaaacccaatcattaatacaggaatagtgctatctgtccaactccagcgccattgtgtggtaggaaagaatttatctgcttgtgctgtagtagtaaaaatttcgctaataccaccatcaactttaaaacagatcataataaagatcagtacagcaccaccagaaagtaataaaccttgaataacatccgtccaaataacgccttcaatgccccccatccaagtataaataatgcataataagcttattaatacgattaacacgaccggatcaatccccataaaaggacgtaaagctagtacggttaaataagtaataatagcaacacgcccaatatggaataacataaatgaaaggctagcaaataaacgactacgaacatcaaaacgagcttctagatattcataagcggaggtgatttttaattttctaaaaaaaggaatatagaaataaaaaactaaaggtaaaattgcaatagctaaatactgtccaataataaaggtccaatcagaagtataagctttagcaggaatggacataaatgtaatcgagcttaatgtggtcgcaaatacagacacaccagcggcccacccaggaactcgccctccaccacggaaatagtcatccgcagttttttgacgtttagaaaaataaacacccacgagtaacatagctgccaaatagccaaacagcactgcatagttaataaaaccaaaatcatgtaattgcattttttagtcctgccatatgtagggtaaaaggtaagttttacgacagtttttttattgctctctagaccatagggctgcgccccataatccagcatcatgatgatagtgagctgatacaatcggcacttgtaatgctaatggttgttgtgccatagcaacttgaaccaattcgagatagccgttagcaagccccacactgccaccaagcacaacacaatcagcatctgttgtagctttaatatttgtgatcaaattagctatggtgttggcagagcgtttaataatggtggtagcctgtaagtttccctgatgaaaagcgctgaaaattgccttagcatctttaccagcaagttccccttcggcctgtgaggcaatcgcacgccccgatgcgatggcttcaacacaaccatagcggccacatccacaacgagggcctcgaggatcagctaaggtatgacctaaatggcctgcaagaccacgttttcctattagtagctgcccttgctgaacaatgcctccgccaacgccggttgagaccgtaataaacaccatatcagatatagtgtcacgacgatgataatactcagcccatgtggcagcttgggcatcattaagtaaccaacaaggtgatccggtaagggttgatagtgtttccattaaaggaaaatcgtttaatccacctaaattatcggggtttaatgcggttaaaatgccattacaaatgatccctgttgatgcaacggcaacactatcggcatggttttttaatggtgtaataatgctaactaatgcttcataaagttgtgttggagatggacttgctggtgttgctatttgtcgatgttgtgtcaattggttatttcggctaattaatgctgccgagattttggttcctccaatatcaatcgctaatgtattcatttatctaactcctgctgccactttaatgcctgagtaaaccactcacagacatgttcaagacgagttaatgcagagccaacggtgacagcccaagctcccgcttgcataccccttgccgccatcattggtgtgttataacgcccttccgcaatcactcgacatccttgctctgctaatgcggtcaccagttgaagatcgggtaattttggtatttccccaccggtataacctgacatcgttgagccaataaattcggtaccgagttgatgacaatacatcccttcattaaaagtggcacaatctgccatcgctagttttcctaaacgatgaacatgctctagcaatgctttcacgggaactgggcgtaggcgatcagtaccatcaaaagcgataatatctgcaccagctgcagccaatgcttcaatatcatttaaccaaggcgtgatcctgacagggctatcaggcaaatcacgttttacaattccaataattggcacatcaataagaggacgtgttgcttttaaattatcaattccttcaatacgtactgcgacggcacctgcatttactgctgcttgagccattgcggctacaatgtcaggtttatccattggactattatcaacaggttggcaagaaacaattaacccacctttttgttgaatatctttagtcatcttttcaattagtgccatgttgaactcactgctctctttttttgaaatgtaactccgaattatattattttacggagttttatttctcaatcagaaaaactacgatctgtgaagaagatcaaacaatgaccaaattgatataacatgatgataaataaacagaataaaaatggaggccaaatagcctccattgattttgttatatttctcttgagtgattaatttagtgtgtcgctgtttttgcttgctcgactaaattaattaaacgacttctcatagcgtgattatcttgagcgacttggctttctgcccatttttgatcgtcaatcttcaccactcgtgcagcacaatatttagtttctggggtttttgaaacaggatcgagattatcttgtgtcagttcgttacatgcaccaatccaccattgataagtcatataaatagcttgtttattaacggtttcgtttagattacaccgtgacaacaccttacctcgacgagatgcaacccaaacaatttcttgatcagcaatacctgccgctttagcaatatcagggtgaatttgcacataccccggttcatctgctaatgatgctaatgctttacagttacccgtcattgagcgacaagagtagtgccctacctcacgtaccgttgataaaatcattggatactcttcatcaggcaattctgcaggagcgcgccatgcggtagcaaaaagctgccctttacctgatggcgttgtgaatcgattatctgaatataaatagggtgttcccggatgatcgagctcaggacaaggccattgtatatgggctaatcccgctaatttttcataggtcgcaccgaaaaatagcggacataatgctcttacctcatgccaaatttcttcattatctgtataagacattggatagcccatagccgtggctaataaactaatgatttcccaatcacgtttaacgttaccacgtgcttgtactgcctgttcaaaacgttgaaaacctctatcagcacaagtaaaaataccaccgtgctcaccccaactggtagaaggtaaaataacatctgcttgctctgccgttttcgtcataaagatatcttgaaccacaataaaatcgagcgcttgaaaaccttttctaaccagacctaaatctgcctcagtttgaagtggatcttctcccatgatgtaataagctttcactttaccttcaatggctaaatgagggacttcagtaatgcgataacccacttgcggatcgagtttttcaaccggaatatgccaagcttgagcaaatttttgacgaataccttcatctgtcacactttgatagccggggaacatattgggtaaaacccccatatcacaagcaccttgtacattattttgcccgcgaacaggagcaacccctgcatgtggtttgcctaaattacccgtcaataacgctaaactcgctagccctttcacaacatctaccgcttgaccaaattgtgttacccccattccccacataatggtggctgtttttgcggctgcataagtgcgcatagcttggcggatctcgcttgcagaaaccccaacaatacgttctactgcttcagggctataatccaccagctgttttttatattcttcaaaaccttcggtgtaacgactcacatattctttgtcataaagatcttcatcaatcagcgtataggcaaatgcattaactaacgccatattggtgccattctttaagggaagatattgattagcaatcttcgctgtttctattttacgaggatcacaaacaataattttggcccctttttgtttcgctttcaccacacgacgcgccacaatagggtgagagtcggcacagttataaccaaacaccaacaaacaatctgaatcttcaatatcagcaatggaattactcattgccccattgcctagtgtttcttgtaaaccagcaacagaagggccatgacaaacacgggcacagcaatcaacattattattacccagtacagcacgagcaaatttttgcatcacaaaattggtttcgttacctgtaccccgagaggagccggtgcacataatagatttagcaccgtatttctctttaattgcgagtaactttttagccgtaaactcaatcgcttcatcccaactgacaatttcaaaatcagcccctttttgtcggcggatcatcggttgatgaattctggctgtcagtaatttattgtcatttaaaaaatcccatccatagagaccttttaaacaaagctcgccttgattagtgacaccattggcaccttcagctttgattattcgaccattttcgacacagagattgattttgcagccagcgccacaataaggacagacggagttgattttgttcatttgatatcctttcccctaactagggagtaaaagagtcataaagaacatccaactaagcacgatttatgccaagtaaaaaaccatgtaaaaataagtagatagtatttctgtcactggctaccaaggttatatcgacatttttgtcgacaagattttctgagcaaaagttatcaaaacgttatcaagttttttaaaaaaagggctttcattaatttgtttttatgatataacaaaatagttatttgttagcagtggcattcaataaatcagtgcaacaaaccaaattcatttcaataaagagcaaaaacatgaacattaacactaacaatcgacttctaggcctatatctactcctactttattagggtggccaagctcgttcattttttgctaaagccaccagtaaggtggtttttttataaccctgctggtggaactgtttttaggggagtttttatgatgtctcgttccactacaaggattaagggttatcacacctttgcaatacactattgttcggcaaccgtttctatcattaacataatgaaatcggaggcaaaatgagccaacaatggacatctcgtgtaggccatattttagcagccgctggctctgccattggtattggtgcaatttggaagttctcttatgtcgccgccaataatgggggtggtgcattcctcgtcgtctttctgttatttagctttattatcggattagctgttttattagctgaaaatattttaggtagtagcacccatgccgaagccgttaatgccttcaaaaagatgatgggacgtaattgggtaattatcggtgtcattggtgtatttagttcatggtgtatctatagcttttatagtgttgtcggggggtggaccattggttacaccattatggcagctactggtgaattaaatattactgatagtagtgaattaacggggatcttcacccgttttatcagtgaccctttatggcctattcttgctcacttggtgtttgccggattaacatgttttgtcgtattagcgggtgttcaacgcggattagaaaaagccgtcaagatcatgatgccattgctgtttattatcatgattattttgattattgtcggtattagcttacccggctcttcagaaggtttaaaattattcttatatcctgattttagtaaattaaccccacaaggagtgttagatgcgttgggattagccttcttctcgctgtctatcggtttgggtattcatattacctatagcgcctatttagcggataataagactattgctaactctagtatgtgggttgtgatcctctcttgtttagtgtgtgttttagcaggcttaatgattttccctgcgttaactgctgctggattagagccaaatgctggcccaggcttaacctttatgaccatgccagtctattttgctaacttgcctggtggcaatatcttggcggtcactttctttgttttattattaatggcagcattaacctctgcaatttcattactcgaacatatcgtcgcttatgtacaaatgcgttttcagtggactcgccgtagagctggcttagtggtcacagcctctattatgttaatgggtatcccagtttcattatcatttggtcctatgagtgatgtaactttagggggcaaaacactctttgatttattggattacttaacctccaatatcttaatgccactgtttggtattgcgatgtgtttaatttttggctggtcacgtagagccaatgcggttattccagataatattactggagcaaaacgccaatgcttattattagtttggcgttatatcggccctatctgtatcggtataatattggtacatggtttgattggttaaaaaacaaaaagagagcttcttatttaagaagctctctgactaattatccccgatgtttggatacttgataactttatttattaatagacttattgatagttttgtttaatttcttggctagccacatgcccgcgtttagcttctttctccgcaatttccaccgataaaccgatataggctcttggatcaagcattgctttaatttcttctgggctaaatgccgcagagataacgggattttttatcaagttagtatagaaatcttcgccatctgctgctgttttgatcgcctcttcatacaataaagagtgtgctttatctttgcctagtttttctgccattttcatcataacgtactctgtattatctaatcctttatttctcatgacgttatgtagcattctctcttcatgcggtactattgttctggaaagctcttctgttcttaatagaatttctgttgtcagctctaatgcctcttccagtaacccatcaaataacatataggagctactatccccttcataaggtcttaccgcagaatacatacccacactgggtaaagaatacagtttttgtgagttagcgatgatccctttagccagtttaggattaattttatgcggcatagtgctactgccaacagtacctttggtaaacccttccgaaacttccgcaatttcctcaagtgtcgtactataaacttcttcaccaattttatggcagatattagccatcaatgccaaattagccatatactctaatttatgtgtactaaggttacgagaaggcacctccatcgcttccatgccaactaattcagccacacgtttttgtaccttcatacccacttctggcattgagttaaatgcacccacagcaccgcccatcatgatagtaaagacgcgtttttcacactctctcatgcgctgataacagtcgataaaatcactgatccagaccgatactttatagccgtaagtaataggaatagcatggcggccatgtgttctaccgggcataaccatatgtttggttttttctgccaagttagctaaattttcgatgatctccccaagtagcaacataaatttatggtgcactgtcttcatcatataaagctgtgaactttgctgaatattctgcgtggtaatgccgtagtgcacatatttaccactctcttgggaacatgccttaactaacacttttaaaaagggcacgaaaccatgaccgattttttggtaaatgcggttcatttcttcaaaatcgatattctcaataaccgctttttctttaatttcatcagccgctgactgtggaataaaaccgtgttcagcttgagcttgagcgagcatcgcctcaaacatcaaccaagttgaatatttagcttcattggataacagcgctttaataccgcgatcatcgattgttttacttttagaatcgtataacgctctcattttgtatcctttgttatttcttcattgcttcatcaacagcattgcgaacaaactcaacttttggcccataaacaatatggacatggttcgctgcaggaataaagaatgctgtacaacctgattccaacattaactctttatcaatttgatttacttcaccgatatcgacacggagtctagtaatacagttatcaacgttacgaatattttgttttccgcctaaagcgcgaattaagatctccgcaatttcgccataacgcttctctttaataagcgtatttttcatattgcttgattcttcacgacccggtgttttgatatcaaacttaataatggcccagtagaaaatgaagtaagtgacaaccgccagacctaaaccaataatcactaagtagatccagttggtatgttcatagagcaggccaaagatggtgaagtcaaataccgtacctcggatatagccaatagccacgccagcaaaagagagtaaaaccgcaccaataccaacaataatggcgtaaatcagatataaaagtggcgcaataaacacaaaggtaaattcgagtggctcagtgacgttacctaacatggcggttaataccatggtcaccaacatagatttaacttctgcgcgattctcttttttcgacgttctataaattgctaaggcaattgctgggaataagaacagagtgaccagcatttgttgttgtgccataaaacgcgttaagcttggcatcattgaccaatattcactacttggcccttggttaaacaacacttctgtcatggcaggaacaacacccacataggtttgtccatcaataacgtaagagccacctgcttcggtaaatctaaacaacacgttccatacatggtgtaaaccaaatggaataaacagtcgctctccccctgctgtaaagaatggtccgacaggactcaggaagaccgcggaaagttttgttaatcccatcaccaagacttcccagataaagggtagtaatgcccctacgccaatcattaatcccaccataataatggcaacggattttttaccggagaagaaggcaaaagcggtaggaagttcaaggttatagaatttatctgtcgcccaagcggcaattaatccggtgataatcccccctgcggcactgatattcatggtttgaatacctaacaccttgatctgccccacttgagtcattacggcaggatcagcgagtttccccgtcaaaacgagccaaatattaatggtgctaatcaaggttaaatagccgacaacggaggcaaacacggcgatccccttgtctttatggctcataccataagccacccccatagcaaatagcagtgggatattatcaaacacgacccctgcaatagagcggatgctcactaataatgcattgactgtttcattccccaggaaaggaaagcgtgcaatcatataagactgaactaaagcgccactgatacccagtatcataccgataggcgctaaaacaccgattggcaggagtagggtcctaccaaagcgctgtatggattcgctgaattttttcttggccatattttttccttatgacttctcgaatatagaaaaatgacaaaagtactctagcattgagttatctataaaatgaatggcgggctagttttaaatattatcttaggtcatttattatgacctaggtcttttaaattaaaaaataatttaataaataataaatttttgaagatagaaagttctattattaataaatagcccattaaagagatattgaacaaattgaaaataaaggtgtttttaaaataaattgttattttagcttaaaacacattaaatttattaatatagtaaagaataaggccgtgaaaaagttaatcttgaagagatcattctgagactaaaaaataatgtttaaagtagattttctatttcatttattaacaaatcaaccaaaataaaaaaaccaattcgtgacttggtatcatcttttttcgtatcatgattatccgcgaaacaaaatagcgtatgcgtcgcataactggttaactcattggtattaaaggctgtcatactgataatgtttgcctcttttaactgcacaatttttgccgtttcaatgatctttttagttccccctgaaagagagataaaaataaccgtgtcatcttcattcactaaacgtgtaaatgaatctgataagttataatcattaataaaaaagcaatgcaggcccagtgcaaacaataagtgttcaagataataaccgactgctttacttgttccccttgccacaataaaaatattacgagaatggcgcagtgttttagcacactctttaatttgctcttcattgatgagggtaaagcttttattaatattcttctctagttgttttttataagatgagtgatcactcttttctattttattacgcgaaagaatataattattaatttgaaactttagctctttaaagccactaaaacctaacttctgcgataaattaataattaccgtttttgatacaaaggttttagcgactaaatcattaatatttaaataggggatatcggcgatattatcggtaagatactttaatactttcttttcactgacggttaaattgtcataattttttaaaaaatccagcatatctcacctaatcaattaataatcatgataaaacaatcagttaagcatattacactctactgcataatatgcttaatcacaaaggtgatccattgcactattgagttaaaaacagatgcgcattatctcaattaagccttaatcactttgactgttgcatcaatatcgacttcatcatcagtaaaggttaatactttgccgtgataagtaatgatatcaatttttttcaaagtacgcgtttgatctgctgccgactcagatttaggcttaatactgttcattagcataccaaccgataatattgtattttctttatcaatatgcgttttaacgggtacttgttcgctataaacacgataagacttaattgacgttaacttaacgcgctctccggcaataaagatatatttactgtctgggatcacttttactgcataggctgataaccccttcatattggtcgtgggttcaaacgtgactattgcatcttttttaataagatcagggttggcaaccttaatcacatgaaaatagcgattatccccattttcatctttgataaatccaaaacctttatcttcaaaccattttgtgattgttccattcattgccattaccgcctacatgatcattattactcaattttctctatgcagtataaagcacaatctgcattcagactatgcctttgcctattagtctttaaattgagtaaataagcatattatggtttgagtcgccaatcggctgaaatttagctatgatcagtgcacttttgtgatcaggataatttgatgtcgacgattattgatacctttattgcccccacttgccatgacaagattgagtatctttatcaagatgaacatctactggtaataaacaaaccttcaggtttactaagcctttcaggtaaaaacccgcaaaatatcgattctgttcattatcgcttagtaccattgtttcccgagtgcacattagttcatcgtttagactttggcacatcgggggtgatggttattgccctgaataaagcgattaaccgtgcactttgtcaacaatttagccagcgaaccgtcactaaagcttatgacgccctattatgtggccatttgcaaaatgatagtggtgttatagaagcgcctatcgcgaaagatccacaacactttccacgtatgtcgattagcaccacacaaggcaaagctgcgcgctcttactatcaagttatcgaacggttttatcagactcttgctgatggcactcgcttacctttaacgcgcgtacgactcacgccggaaacaggcagaacacatcaattgcgtatccattgccaatatatagggcaccctattttagggtgtgatttgtatggtggcctattattatcaggaacagagcataccccacggctaatgttgcatgcctgtgagttacattttattcaccctgttagtgagcaaccgatggatatttatctaccttcgccgttttaatatcaagccacccttaaaatcaccacattaaatcgtctggcactttaaaatcagcataaggatcatcttcgtcttgttctgcttggcttaatgtgttgtttaataagatacaatctgcatctctttgcatgattttatctgccacactcgcaggaataatggcatattcattgtttccggcgctatcaatcactaaacgtgcaatagctaaacgaccattaattaattgagattgtgttactttatccacctcaagcgttttaatcacattattatcggtaaatttaaaatcaatatcgcccttagcaggggtaattctattcatctcaataagttgtttaacttgcgctttatactcttttaataaggttgcttgtttttgctgttcactgagttgtttatcacgctcaagctgtaaacgtttcttttcttctacagcctctttcgcttctctggcctgaacccgcgattttttcgccgttctttgtactttagccattttcttatttgtcactaatcccgcttttagcatctgctcttgtaaggtaagttttgccatttttatgcctaattttgctcaataatgcccgaaattatacctgtaatttttaagactgcatctcgttacaacaacgcaaattatcataataacactcataaccatatcgatgttatttgctgagtaagcgttgtgttaatcacattggctcccttaatgcattagggtatattgagaagtaaccaaaaaactttctctatcatttataacaggcaaaataaaccatggctgtgatccccaaaaactatgcaaaactagaaagcggttaccgcgaaaaggcgctaaaactctacccttgggtttgtggacgttgtgctcgtgaatttgtctattcaaatctgcgtgaattaaccgttcatcatattgatcacgaccacaccaataatcccgaagatggcagtaactgggagttactgtgtctgtattgtcatgatcatgagcactcaaaatacacagaagcagaagagtacggctctaccgttgtagcaggggaagatgcccaagatgatgttgggcaagcaacctataacccttttgctgatttaaaagcgatgctgaataagaaaaagtgatctaatcgttatcacgactgagaattgacatcctccacgccctaaaggacgtggatccctactgcgttcagactgatctctgaatcacctcggcgggttcctgcttcgacgggcggtctgactgcaccctccctccacaggcaagcacggcatgtcctgccgctaaaatgttacgtgccccgttgatatcagcattcgctgtatatccacattcaaggcactcgaattgactttgtgactggcggttttcctttgctgtatgaccacagcaagcgcacttctgactggtgtaggctggtggtattgccactacctgacctcctcgccagagctgcttgtactcaagctgacggcgcatttcataccagccctgctccagtattgagcggtttaaaccagatttagcttttacgttccgtccaggccgttctgtcgtaccttttgccgatttagacatgttactgacctttaagtcctcaatgacaatcattgcgtggtttttgctgatttcgctggtgactttgtgaaggtagtctttccttatattggcaatatgagaatgcagacgttgaattttgcgcttttgtttttgccagttggcactgaatttgattttacggcttaatttccgttgaagccttgccagctttcgctggtttactttaaaactgctgacgggcgggtataccgtaccgtctgaaagcgtggcaagttttgtaacgcctgcatcaagcccgactattgaggttgattcaggttgtggttctgtcgcttcatactcagtctgaatgctgacgtaccatttaccgcatgactgactgaccgtgacgtttctcacttctccgacgacttcacgactattgcggtactgcatccatcccaactttggcaatgatatacgactattggattgatcgagcttcacgccctgcgggtagcgaaaagcgtcatttttaccgcgtttcttgaatcgaggaaaagcggtacgtttctggaaaaaattcttgtaagcccgttccaaatctttaagtgactgttgtaacggttgtgatggggcttccttcaaccattgtgtctctgtgtcagatttccactcaatgagccatgaagccatttttgtatagggaatgtatttattccctgcttcgtaattctcattctgacgtgctaatgcccgattgaaaacaaaacgacaagcccctgcaaagcgtctcatctcacgctcttgctgaccattgggtcttaactggaatttaaaggcttgtagacgtttcatattatctattatactttggtctatgaaaaatgaaactaatattcgccgtggcagacattgtgtgttcctgatgcacatccatttggtctttgtcacaaaataccggcgaaaaatatttgatcaggatgccattgaaaaattgcgaggctactttgccagtgtttgtgctgattttgatgttgaattggttgaaatggatggggaacgggatcacgttcatttactgattaattacccgccaaaactggcgatatctaatctggttaacagccttaaaggggtatcgagtcgattacttcgacgtgatcgtcctgatattgcccaacgtgattactacaagggggttctttggtcgccgagttatttcgcggggagttgtggtggcgcaccaatatctattatccgccagtacattgagcaacaggaaacaccgagttagttaaaaaaccgcgccttatatccccgacctgaaggacggggttttacggtgctttggataaatcagatagtgcagtgtgttaatctattatagaacgttaatacactgccaataattcatatccccgccactcaatatattagtaaaactattatttttatcttatcgataactgactatcgcgctatcagaaatgttgaaattgtttaaatttaatatagccaattaaaaaaaatattattttttcaatagtttttattgtttccatgtggagttaaatggatttctctcactataaaaacactttaaattggttatatcacttataaacacgaaatattaaaaacattatttcaaacaagacaattattttagattaataatctagagaaataataacaataaaaagaaaaatggtgaaatatttataagaaatataattaataccattaaatatcaaatagttacaaaactttaattcgttataaaagcactagcaaaaaatttattttttatgtacatagtgtttactgggctgcgagcaatttgtctatttcttcatcatattttatgctaacaaacactttttatgattattttttcagcatgatatagcgatatttcaaccagtttacgctaagtgacttatcctagagagatacaacagcaaggggcggtttacagcctattgataagcttttattatcctttaatcaagtcttaccgtgcgcactggctaagatgacggacataactaacggattgtttttaagacaatcatttaatttaatttgtcatttttaataaaaggatctcattatgccaactccttgctatatttccattgaaggaaaaactcagggcaacatcactgcaggcgcgtttactgcagattctgtcggcaacatttatgtacaaggtcatgaagaccaaatgttggtgcaagcattttctcatgtggtgacagtaccgaccgatccgcaatcaggacaaccttccggccaacgtgcgcataaaccatttcgttttaccgtggcattaaataaagcggttcccctgctatataacgcattggcttccggcgaaatgttgccaaaagttgagctaaaatggtatcgcacctcggtagaaggtaaacaagagcacttctttaccaccacactgactgacgcgactatcgtgaacatcgattgccaaatgcctcattgccaagatccggctaaagccgacttcacgcaacttatcgaagtctccctctcttaccgcaaagttgactgggagcatactgttgccgggacttcaggtgcagatgactggcgtgcaccactcgaagcataagtcatgggttaaacgagtccttaggggctcgtttaccgttttagtctcctacttcccgtgaaggattattggatgtctataacaaattcaaaaaaatatcaaaggctgggtgataaggatggcaactcactgagtggggataagacattaacccatggcggtggcagaacatacgcgcaagatctcgctttacaagagcaacatagacaactcatagagaagatcttaagtggcgacatgcaaagtggcttagtgtttacttgtcagattggtggattacccgaagagactttccaagtcacgcaattcgatttacaagaagggatctcacaacttttcactctctccatccaagccgtcagtccactctcggaaattgattttaatgatgtgttaggcatggcttccagtttgacagtaaagcgagatggtcacattctgcgtacagtacaaggtatcttagcggcggcagagcaagggaataccgatggggtaaaaacctggtatcaatttgtgatacgtcctgaaatgtgggtaatgaccctcaaacaagatagtcgtatttttcaagataccaccgttcctcatattcttgagacattactcaatgagtctcacattaaatatgataaacagctttatcacccagaagagcatttgcagcgcgcctataccactcaaaaacgagaaacaatgtatgacttttggtgccgtttagccgcagaagaagggattaatttttggtttgaagaaggcccacagttattttatagcgaccgacatttgggcatgagagcggggatatccttaacctataacccacaatcggatacagatatcaccgatagcaccgccacaacgtggcgctatgttgaacaactctgtagcgatattcgcgttgataaagattacaatcaacttagaccttcctaccccttaagccatcaagtcacaggagaggttcatcaacaacatgaaatatttgaaagttatggacgctttgaagaagatgctcagggacaaccctttaatcagatacgttatgaacaatcacaaaatcagcgtcaagtaggctctgcgaccacaaactgcattgaattagcgccggggcgtatttttaccttgtctaaccaccccagtgcacgcatgaacaccacatggcaggtgattagtatctcacatcacggtgtgcaacctcttgccgacaacagtggcggtgaaggaacgcaattgagtaatcagctttcctttgtgccgagtactcaagagtggcgcccgccttaccgttttaaacctaccgccgatggtgatgaattagccactgtcgtcggcccgccgggcgaagaaatctataccaatgagcaaggtgccgttacggtctattttcattgggataggcgtggtaaaccagaccatagcgcatcatgctgggtaagagtcgctcaaggttggaatggggacggatttggctttatggctattcctcgtgttgggcaagaagtgattatctcttatttaaacaatgatatagataaaccgattatcaccggatgtacctataatggtcgcaatcgttcccccattgatttacctaaacataaaacccgtaccacatttcgcaccaaaacccataaaggagacgggtttaatgaattgcgctttgaggataaaaatggcgatgaggaaatttatcttcatgcgcaacgcgataataatattcatattaatcataataaaacccaatacgttgggcatgatgatagccatactgtcgccaataaccgtaagcatgaagtgtgtcatgacgaatttatccacatcgtcaatgagcaaacagtacaggttgatgtcaatcaatttgaacaaatagggaaagaccgtatcacacgcattgacaatagttggaaagaagttatccacgccagtcactttcaggaaatcggggaaaacaagcagtgtgatatccaaaatgattataccctgaaagccgcagggggtatccatacccataccaaaatccacaccttgcaagccagtgaaacggtcattatcaaaggcaaggctgggtcgattcaattggatgcacaaggtgtgactattacaggtaaaattctgctcaaaggcgatgtgtcaataacggggggcgccccagaagtggttactcagttagaagcggcggttaatgaagggttaccattagctgaggattgccgtgcgaaagcgatgaaaaaaggaacggcctaatgctcttgagtccaaatcccctctataaagcgtattgggttgctcaatgccgttatactcgcaacggtgaacaattcaagggggtgatgaccgtagcaggtacaagtcaaccacaagctattaagcagatgcgccagtactttacggctcacccaggtgaatatacctttgcggactatgacacattaatccctttaatcacccatattgaacaaagttcaaccttagaattaccgttaatacggcaagtacgtgagcaacataatgcaaaggtttcagccgtattagtggataaatgcaacctcacacacccaagaccgtcagaaaaaggcgacattcattaccgtgaggggcaacctatgtttattgaatattcgcatctctatgtcgtcattgacagtggggaataccaccgccaaaccgggcaacatcttgtaccgaaactgcatggctcacaactgccatggaaatcactctatcaaggtgaaactcaagacagccttgaagataaagccccttatttggtacacattgccgccaatcaagccggtcagcagtttctggctcattacttgaatttaccacataaagcgagtctcggattatttatcaatagcctcaaaccctttaccgatattcaccggcaaatgcgaaaactcacctatttatataatcaaaaactggagagttggaatttctttcgtttttatgatgttaagcactttatcccatttattgagtctttgactcacggacagttaattaatgtggtcaatggggtaaatgcgttctacggctatagtgcacaataccccgatggggttgaaatcacctttcacccagattatctgtatgacggcagtaagcgagagccgttatttattaatacctatttatacaatcactacgcgaatatcacacagctgcaaactgtggctaaagctaaggcactgattgaacaattttctcaggtagaaggggatgagttagagggtgacgcattaatgggctactgtatacacgcagcaaattgcagttttttagacgatattcatcaatcaaaagcgttattgtacgacttgcaagcccgctatttgtgccgtcatcaaccgagaacatggcagatcgccaatgaaaaagccgcaccttataaatacaaccaagttttattgagttaccaccgttatatcgcctgtttaaatacccaaggagaaatgaaatgactggagaagtgaatgagaaatatttaacaccgcaagagcgcaaagcgcgtcagatggtgaaggcggtaaacgaagcgagcccacgaaacttaccggccgacgcggtggtatgcccatgtgaaaatgaacatcgccctgtttatccggtgcgttatgcatataccaacttttattgtgatttacatttttctacaattgaacaagcaccaaataaaacgttagaagcgagtattcctccttctattaatcaattattgaatgcgaaagatgttactgctagtaaaggattttctgcaagattattaagacaaggttgggtttatgtttttgaagaaggcaattaccctactagaagtaattctagtaataaaagttatcaagaacaaaatgttgatgcgacaaaaggacgcctattagtttttcaacatcaagttacaaccagtgatggcaatgaaaatttcattccatatatatttaagcaattaaaaaatgggggtgtcactttaaagaaaaacggaaatagtaatccttatttagctataccgaaagatgtgaaggaagcgactatcttattcagcgaaagtaaattatctgattacacacttaaaaaaatcatttcatcttctaagtttagatcgaaattaatgcaaaaaatcaattttattgattacaacaataacgattattgtattgagctaaataaagataatttaaatcgacttgttgaggattataaagaagaagttgataaatttaagctatttgttaaagaattcacgcattcaaatataccctcttcttttttttctgataccacaaaaatacccgacttaccacaagatgcaactgttttgattaatcaaataaatagtgttctagattataatgaaaaagcgacattgcttattttaaaagatcccgtaggataccaaaaagatgttttatcttattataatattgtaacaaaattacatttattatatcagaactattatagccatccggataaaattggccaatttattacgagtatacaagaagctagtcatcacattaaagatactgatgaaaaagaaaaaatgcaaacaatactaaaagagagtattaatcagaatgcattagataatgagtggaaaaatattcataaaacatttattttttttgagaaacatcaacgtattgtattatcattgtatgaaagctttatgaataatccggcaatcattaatgaaaacggtggcttaaaacattattttgattatgctttttcatatcacgaacgtataacgaaagaagatgtctttagtattgatttttttaaggaccttaatcaagcttttgatttatattttgatttaatatctccattaatgaattctaccgaaggacaaagaacattagataaattatattcaattaatgatgaagaaaataatagcctgtgggtgggagtgacaaagaaagtaattagtcttgttgctaattcaaaaattatggacgcacttttaaatgcacaagaatatgcagagaatatcgaaaattttgttaataagcttgcgtttatttgctcagatagcattggttttgcatttacaaaaacaagtaagatgctttctcattacgatattaaaaatagactaattaatactaagggtattgactatttagctcaaaagatacttccgatgatactggcattttgcaacacaaaaatttcattaaccgagtttgttaaattatcgggtaatgagcttaaccagtgggtggaacaactccgtaaattaacggaacaaatagtaccaaatctgcaacatcctaaattaaataagcttttttcttggaaacaaaaaataataaatctaggcgaagagactgccgttcttattccgaagattgagatcacagatattactaaaaataagatttatatttatggtaaagatgcattacaggtttccactaagctatttttaaacggtttcagcatgatcaccggatcaatccaagcttatacattacaaggtatgagtttgtatgaacgtaatgacccattaaaactatccccctataatctgtatacagcacagattattgcgaatttatttgtagcaagctacagtattttaaaagtttctcaagaggcgacaaaattatctcaaacagtatcgagcaccacactgaaattctttttagataaaataaaattacctatgctaacaacagaagtgggaaccaaaagaatggcagcattaggtaagattgcaggtgccgttggtgttgctcttgccactcgagatgcattagaagcttttcatattggaaataataaacaaggtttatcaaatgtagccattgccattggttctttcatgctaatttttgttacagggggatgggctctatttgcaggactgctaatattaggaggcttcttctcaagtcaactcaccagttggagtcatttggaaactttgctaaggcacagtttttggggaaatgaagaaagttcaaatttttgggataataatagaccaacaccgataggagaacaattaaaacaatatataaaagaatttgaattctatgaacaaaaagggctaattgaattacaagagttttataatctattttatacagctaaaatgactcaagaaaaaataccaaatggaaaactccgcttatcttttgaatttactaattttaccccagggatttcagaagtatattttcactttgttacagaggttggttatcacagcggcttggcagaagaaataaaaacacctagttcagcttatgttctaaataaacgaaaagacctcttagaaattagcgaacaattaaaaatggcaagtgaaaaaggtgattggaaccctgaaacaggtatattgaaatttagtttggaagtacagtctcaattagtaaatacatattctgcttttggtgcacatcctaatagccgtataggtattgaagatttatattggtattatcaagtcaatcccgaggtaacaacaccgatgcgttatatcaattgggggggagatacccaagaaaacaatcggcttttaggctttattaacagtgagaatatctaatgagtatttttttcaatcccgctaaacacccacatcgcttgaagccacaaccattgggggagcaaggtgagcgctataacgaagattggcccatgcctgagctcgattttttagagaccgtggataaacaacagtgcattctggttgataaagaaatacgccgacgtgatgcgtttgctttccctgggtttattaccggtattattacctttattatggtatttcattttgtttttacagaacataattcaaagtatatccgttttaataaaaatcttcatgactatacattagaatataaagcgcaatatgaagataaaactcaaagagataaactaccttcatttatacttgataagtacgccccttatttcaatcaagaaaaactgtctattttagattatattcatgtttattttgggggacatattacatcaaaaccctatcaaaatacgctattttttctttctactttcatcgcacctttcttcttaattggcttgggtggctatcaatcttttttcaaaaaaaatccaatactcgtttttaatcgtgaaagaaatctggtttatacttggcgcaaaaataaggtatttattgcccgctatcctgaaattggtatcggtaaaattggtaaaacacttacctttcaattattcgggttagataagtcaaaacaaactttagtttctgaattatttttccctaatgtctatgtttattcagtgtacaataccagtactgactatcacgaccagcgcttcattaattttatcaatacttatatgcgcgaagggcgtgatgccattattccattcgattatcaccgtaaaaaacccaaagtgtattttggcaaaaacccacctcctgctgattttgagcaacaggtcgaacagattttagcaaagcttgatcaggagaaaaaacaccatgcgtagtttggtaaacggcagaaagattattttagaaaatgatacaacaaataccggcggtaccgtacttaccggctcttctattgctaaacaaacccaagggattgcctgtgtaggtgatcctgtttattgccctgcgtgtaaaaaaacaggcactattattgaaggggataatttaatgaaaattaaaggtatccctgtcgccctcgaaggacataaagtcgcttgtggctgttcagatggctgtatactcgttgcaacagattaagcgatacccaatatcatgtatcataaataaaaaatgatattcttttttagaaattaattttgccataacacaattatcagtaaatttaaattcgatgttgctattcatctaaaaaaagaaagtcttcaactaaatagtagttttaattttatatacttttattctcacgttgaaattcgatgggtcaaaatatgaaatatcattccttattaaaaaatttattttatgcaacactttccatcatggcgttaaattttagtggcgtcactatggcaaaaaataccatgaatgagatttatgttattaatttatcctcaaatgatgcaggttgtggtataaaaattaatgaaatgttggtaatggataataaaaaataccctaaaggtcattattccgtcggtcaaaatatatctagcatattaactaatggggaaaataccttaggtgtaattatgtttaatggctctattttaacaggtgaagaaaaacttacccctgatatgtggtgtgaagtcgaacttaagaaattatctgcaaacggcgatacctccttaatatcgggacttagattaaacggaaataatgatgggaaaatggtggtctctgataaatatcaaaataacagtgagcaaatctattttggtggccccagtagagatagtgaatttgatgttttagaagcaaaaaaccaatttaatatacagggcctcccccaatggcaatggggaaaagctactcccgttactgaagacgatattcctaaaattcgtgctttttatgccgaactacgacaagcatttatcgataaaaatctagataaattaaaaactatggggaaaatatcctgggaagaaatggcctatgccgataatggctctcctgatatcttttggaaatcgcttaattttcaagaacgattagaacaaggatatagacccaatccaataagttgggaaaaatatattcttagtacttacttaaatcaccgtatttttcgttacgaagctggatttgaacgcttatctcctattgagttagttagccctgaagggaaaaattatttttataacccttacctttctattattgatgggaaagtgactattgtccgataaggtgcttcttttatgcctaccattattcttataggtgattcggacactggccatgatcatcatggccaatacactttaaagtcacactattactcacaattccctatagagtaatatttatcaaagataacaatatacttacgacttttttgacttatgcgcagatctttaatttgttgattgggtaataaataaaatacataaggctctgagtcatcatcaccatcacaattttgatgtaacaaaaccctaaaataagtattgcctgtattttttaatattccttggttaatatttaaatcatatttgaaatctggatctttaggtctaacaacaaaataggtttctaaacttactgtggggtagaacagtggttgttttttttgcccttcatcatttcttatatcaagtggcgtttcactaataataattttataataacgttctttttcatccgcctctcctcgatagaaaattttaaaaaattcctgctccccgggtaatagaatttttttaaggggagtaaaaagaatttctccattctgaataggtgtgccctgctcttgataacccggcctatcaatttggtaagcactaaatgtatataaattggtttttttagtatcattaatatagggcttagaaaagaagggttcccccgactccatagaggaaatatctgcactaatataaagtgcatatgcatggtgataaaagaagactaacaacatcccgcaaagtatcttaaaccaagatattagtttcatattaaaatttcagtattcgttataatagaaagcgacttaaataaaaaaccagtacgttcttatcagtcgccataacataaaaataatcaactttagttaatatcaggcccagtccatatagccttaaccgttacccttccactggctgagactgttcctagccaatcaataccatctaaagtgaaaaatgagttagcatcattcattggaaaagataaatctaggttcgttctataaaaagagcctaagtcttcatcaggtctatcccatggtgtttctgtccataacgcattttttaatgaaatttcatgactatcacaactcgctctatattttgcatccgtgccatcactatttttaaatgagagataagccggaaaaggcacattaagtcggttatcactggaggagaataaacaataggattgcccttttaatgttgtttgtggtccttctacagatgcagtaatagagtctgcttgtctagggccactggtggtaacaatataattaaactcaatgggtggctcttcattacccacttttcccgttttagattgatgagggttaaaatcagcaggaataatgcttatgccataatctctcggtttcagaataagtgtatttgagggggtgaactcataatacccagattgaggcacggctgtattggtaaatgaaaaggtaaaaaagtcttggctatttttaaagtcgacattactagagacgagtctttttaaaaaggtattagataaaaagatagaaacatttttattattaactttaaaataataattagcgggatatgttgtattataattataccagttattactgccatcatcggggccaatttttattgtatttgccgctggcgtaaaagggatcagtgtattattaatttttaaattaagcctaatattggtaaatatatccccagtagtttcatgatcaatcacctgacaaataataccattttggtttgatacaatacccactcggcaaaactgagagcctaagccaatcgtgggattaccgttactatcaataaatatttcttgtaaagcacctgttgaagttaacgtgatatgccctgacttagtgatattgaattcatgtgatgcaagcattctgccaccaacactttggcaagatccgcctttgcttggatcatagtctgtttttgtcatacaggctctataactatatgtctctatagtgcctacaggtaattggcgaaaatacaggtatgccgaatcactaaatattccccgagcataagccgattcaccgttagtattcgtctgtactattttataagccccgtctttacctatatattgcgcaggccaatagccactatcatctgtacaataacgcctcatacatcggttacccacaaatggcttatctatttgagaattttctagccaaatatcgacatattgattggcctgaatggatgtattggtataccccatataacctaaactgagctgtgaagattttgaataacgcgtatatttattggcacccgaaaaacgcggatcggttgttcttggggtaataaaatattcattatctacattattctcaataaaaacgtaactattagttaccgtagcggcttgactggttgtagacagcgataaatttaaaagacaaggtgctacgagtaaaaaaaatattttgctattcataataaagttctcgttatctttttacgaaactagactgaggttgacaagttacctctccaacccacattgctccttgtgcccctttaagatctaagtctgcttcacagattgtttgctgatcttcttgtagtaacgagatcaccggataacggacatctacatccattgaaaactcaccattttgatctgttttagttcgaccaatatgatttcgaattgaagcatattttaaaagttcaccattaggggatttcagacgtccgaaaactgtgactaattgcctcacttccggttgataaaaggcaatatttcctggatacaatgtgacggatttatttcggccagaaataatgtcaaagctgtctttcgatttgccatcattcattaattggatgtcataatctgaataaggagataatggaataaaggtattttttccactaatcgggtaattttgcccattaactttagcgagcatactgccactacctttaatatctgaattgataataatgccagatttaccttgttgaccactgggtgtgatcatcccttcactataagctatagagccacgagaagttaaattaccattgagtcgtttattatcagggcgattaatggtcaccgtaccagaattatacttcgtatcataagaagcgtaacctagtgttgagaagtcagattcaccattatctttatcatgtactaacttagaaacagaaacgcccgcattagtgatcacggagttttcaaaattcttattcacataaatattggcttttacattgccattggttgaagagatcccagtacttaaccacgttgaaagaggtaaagagaaatcaagattaataaatttttcattagtgctattttgattatcataatgataacgctgaaccccagctcttaatcctaccgtgccataacgtcccgaaaataatgtatttgcatattcataattaatagaatcactaccaactcgcttatctttggtattgctgatagtaaatgaacccgttctatccattatcttatcgaaattaatagttcctccataagagtaactgtcagcctcatatagcggtaaatcacctcttacgatagttttctctttagatgcccataatgaaccatagccttctgggatattaatagaaagcgtactaatattacggtgactaccatgattctctaacattccttgccaagcaatagaaagatagttatttaccgctacactgatattcgtctcctgtacaataaatttatcaaatccatagttagacatttgaaaacgaataccggataacacaggaaagttataagcaaaagagctaccgattaaataacttttttcgggagtttggttataagagccaccctctttgatataatgacgtttatcaaaatcaatatagccaccataaatttcccaatttaattggtcaaaattaccgttagcggtgccaaaagacttattaatggtttgatgttgtgttgtcactaccttgccatcaataacggtttcaatcgttacttcataaataccataaggcaacatgctggtatcaacttcaaaattacccatcgggaaattttgaatatttaataatttaccttggcgataaatacgaacttcacctggactatttaaaaaagcataaatcggagttaatgattgctgtttattcaccaccctacttgatgaattattcccgattgatgctgcataaattttactgctgctcaatactgttaagctggctaaggactgtaaattccaagtgctcattaacccgatagcaaaacgcaatccattaaaatcacgttcatacattgctctatagagttcaatattagaattggatttacctatactgtaggcagatgcattaatattaaaatggtgttcagctttagctaataacgtgtctaaattaaagtagctactggatgaatcttgggcgtttttaacacgactttgaaagacgcccaaatcatagttggccacagcagaaaatgaattaacagatgaatttcctaatatggattgtctagcatgttctttgggtgcaaaagctgacttatcaacatctaatgataaattaaatgaagagacatttaattgaagagcagcattactatcaatagttatactattattttcattaaagatagcatttttttattttcaattttatcaactaataactgatttagtgttgcgccttgattattttcgattaattgaatacttgatagttttattttatcattatcgataacaataatcgcatctgcaattttcttttcactttggttttgtttatttgcatcattaagtcgtaagaaaacgggcaccgacataccttcctctaaagcattaacaaatgccggaggaataatatatccgcccactttaattctttttatttcattagcattaatcgtattcgaaaaaataatacctaatattgataaagcgataatactcttacgcatgatttagcccattctttattttttatttgacaacaatgaactctcctttgtgccaaatgcctacgctagattttttatttgtgagatcgacaagttgtaatttaacggctaaatgtggcataaggtaataacgctcgcgacacatcccctccacaccatattgttgtttttctgctagacaagggcctgaagccacaacacgaaatgaactattaccgatattagaaactttattatcatgatactgataattaaaattctcaattctgggtgcaaccactaaaattgtactaatagttgcagatgttgttgctgtcgctgattttgagctttgtgttataccattttcagcaataggatcatctttccaatttaatcgataataacgctctttatcatccttaggcccttgataaatgattttaaatacatcacttgcatgaccgggaagaatcagattagccggtgttgataaaatttcattgggatcagtaaccggaataattttcccattttcaagtggtgagtctaatttttctattgtcaaattgactaatcttgccgtatttactgtattttcaatttctttggcaagactactttcatcagaagatattatctctgttatattacctacatttactgcaaaactattttttaatggaaaccataataataaaaaaaggattaattttatcttattcataatagtcagtttctaaaaataaataacgataaagatattacttccctatagtatctttatcgtaatatcaattagccaataaaggagaattaaggttctggattaggtttaacggtagaaaagtcaccatcccaagtggcagtaaattgcacttttacatcaccatcccagacaccatcagccagtgatttaaaatcggctgttgctcctgctgcttgtgcactggcaattacaaaagtgaattcaccacgatctgtagcgcgctcagagccattgtaaataccatcagcagctaaattatctaaacctgaggttaacccttttgatgtatcaattaacacgacatcagttgttttagaaaggtcttccccattccatttaacaccaactgttaatgttgaatcatcagttgttcttgctaacgtattagcaatcagttttgatgataatttaaaatcggttgcgccagattggccttgaatagcaatatcaaatgcaccattttgttggttaaatgatttttggccttcagcataattaaaagtcagactttttaatggagtgacaactaacatactggttgtatctttaattgcagttgcttgccaagtcgcggttgcttgtgcaacacgagtatctgcattagcagccgtagcaaaagaagcagcaataattgttgatagcatcaccgatgctatttttttatttaacatattattctctctaattttgatttataaaaaacaattacatagtataaaaaacacctttaattgtgctttttataaaatataattaataaaataattgcaatgataattattttatgtgatttattaatttttaatgtaattaaaagttatttatgaagttttttgtttgacaacctttccataaaatatatttctttttattatcgactttgtttatttctctctcatcggaaaattcattttcaagatatttaaatacatctacccattttttatctaaaattaataaaaaatttgctaattgatcaacggtaattgcagtagctcctatttcatatcgtgaaatttgttgttggctaacattcattaatcttgccaactgctttcctgtcatatttttttctttacgtgcttttcttaaaaaaataccaacatgaccactaatcatattagatttcattaattacactccaatagaaaattgttaactaaacatttcatttaaatcaatcataaatatataaaaataagagtaaaaacgtttataccgatcgaagttagttaacttaatagctacaacctatcaaatattggttattgatcgatttaatttattagcttacgcaaataatttgtatttaaaagaaaagatttttattaattatatgataattaaataaattaagtttttaattaaaaaataatttaaaaaatatattttttatagaattgcagaaaaataaagaataatgcattattgatatagcctaattgatatatttgatcatatacatttacaatttgttacataattcatcaaatagcgatttaagtactaataattagagtactataatactctgataaaagcgcatttctggttgaatatcctgtaatcacatttattaagaacacttaagaccgaaaatagcacttaatcaaagaattagtatcaatatatttgtaaagtaatcacatgattttaaatatcttttttaattccattaatactaatataaagtgtaaaaacacattttaatgaaaatagagatcaattttaataagtaattatattactgattaactagattattgatttagatcaataatagtattctgttattatattttcattaatctttaacggtaattaaatgcctaagaagttattttaataaaaattatatatataataatgcaaaaatatttttctttgcattaataatatggcaagaagtttatcaatatatcgattataaagatgatgtcgatttacatgaataattagctgaatgggaggctttttataattgtcatcgccctcactcagcgcatgctggtaaaacaccgtatgaagtgttaaaaaataagcttagtctttaagactaaacgtcagccgaggttttgagtgacacagcgtagagatttttatctaggaacattctatccgtagtggtaatttcacttatttttagaggatggtaaatacactacttatcttattatcttacttaccttttttcagcaaatctttcaatgctgcaatattcgccctcgccccttcagcttcttttaattgtcgacgtttttgagcataaatatcaaatacttctctggctttttcatcagcggctttcttactaattccacctgcgccttgtaatacatcacggtcattgaaacttaaaaactgatctagcttagtatcccaatcttgtaaaaaaacttgcttacggcgcagcgcttggtcttcagcaaaatccagccacatattgacgatacggtttaattctttcagctcattttcgcgtagataattcttcgcaatcgtgacatcggttttacgcacctcatcaaatttatagttggttaagcccatatccggctgactggcatctgcgcgactagctataagctcagcggcagtcatgccggtacaagcaaaatgtaatttgttttggatagattggaagaaacgagttgtttctttattggatggttcgtaatccgctgccatggtgaagatctctttcacccgtaaatacacccgccgctcactggcgcgaatatcacggatgcgttcgagcatctcatcaaagtaatccggcacgactgactgaccgataggcgggtttttcagccgttcatcgtccatcacaaaccctttgatcagatactgttccagcgtttgcgttgcccactgacgaaactgagtaccacggacagagcggacacggtaaccaacagcaataatggcaggtaaactatagtggtctatctctctggaaacctgacgatttccctctaatcgaactatccggaatttccggatggttgcgttttgagcaagttccccttcagagaaaatattaacaaggtgctcgttaattgtacgaacgtcttttccatacagctcagcaattgatgattgagataaccacaacgtatcagactcaaagcggcattcgacacgagtttgaccatcttcactgcggaacaaaataaattcaccctgtggtgcttcaggaagattatcactcattacatggcctccgctctatacgttatgcataaactgtgaacaacaatatagcatatttaacaaaaaaataaggccaccagcaaatagatagcaagcacattattttatgaaaaaacaatgtaatacgatcccctatactatccatctttctgaataatattcgtacatttttcagtcatcacccatagcgccttattcaatttactatcactatcaataccattcaccgaacatgtacgagtatgcttacttttcacatttctgcctaatagcactcctgtgagtcaattctcttgcaaacgttttaacatttgttgaactaaaaatagcttaataactgatcattaagggattgattgagttttgggaggtgtaatgaacttaagtggcggaagatcacaggagtcgaacctgccaaggaccgctggcggccccatctggatttgaagtccagccgccccaccggggacgatgatcttccatataggattatttgtatgaaataacatgatgattatacgctgaaataaaatcattcccaagtgcactaaatcaataaaacctctttcaaagaaaataatcccgcttttgagtaaaaaaactgataattaacgcgatactattgaacttatgcactttcatcctcatcttattacctatgacgaataaactcagtgatgtatgccatgtcactgtaaacccagatacaggatgttttttatgtcaaatccattacttagcacaacgggattacctgcattttcccagatagaaccaaaacacgttgtacctgccattaaagaagttttagctaattatcgtgcaaccgtagaaaaacttctcgctgacaacaccgcttttagttgggataatctttgccaaccgttagccgaagcgggtgataaactttctcgtgtttggtctcctgttagccatttaaactccgttaaaaatagcgctgaattacgcgaagcttacgagcaaagcttacctttactgtctgagttcagtacttggatgggtcagcacgaaggattatatcaagcctataaatctatcaaagaaagcgctgattttgccttactgactcaaccacaaaaaaaagccgttgagaatgcgttacgtgactttgaattatccggtatcggtttaccaaaagagaaacaacagcgttttggtgaaatcagtgcacgcctatcagaactgagcgccaaatttggtaataatgtgttagatgcgaccatggggtggtctaaacttatcaccgatgaaagtgaacttgctggtatgccacaaagcgccattgatgcagccaaagcaatggcacaagcaaaagagcaacaaggttatctattaacgctcgatatgccaagctatctacctgttatgacctatgctgataatcgtgagcttagaaaagagatgagtattgcttatagcactcgagcctctgatcaaggccctaatgcaggtcaatgggataatagtgaagtgatggcggaaattttagcattacgccatgagttagctcagttgctcggctttaaaaattatgccgaaaaatcacttgccactaaaatggcagaatcaccagaacaagtacttaatttcttaactgatttagcctctcgagctcatcctcaaggcgaaaaagagctggctgaattaacgcactttgccaaaacacattatggtgtggaaaaactagagccttgggatctggcttactacagcgaaaaacaaaaacaacatctattctccattgatgacgaacagttacgtccttacttcccagagcaccgtgcattaagtggcttattcgaagtggttcaccgtatctatggtttaacggctaaagagcgtcatgatatcgacacttggcacgatgatgtacgtttctttgaattatatgatgaaagcaacacattgcgcggtagcttctatcttgatttatacgctcgtgaacataaacgcggtggtgcttggatggatgattgcattggtagaatgcgtcatgctgatggcacactacaaaatcctgtcgcctatcttacctgcaactttaataaaccagtaggtgataaacccgcactctttacccataacgaagtaaccacgctattccatgagtttggtcatggtttacaccacatgctaacgcaaattgataccgctgatgtatcaggtattaatggcgtaccatgggatgcggttgagttaccaagccaatttatggaaaactggtgctgggagccagaagcgttagcctttatttctggccattatgaaactggcgagccattaccacaggctatgcttgataatatgctcaaagcaaaaaattatcagtctgcgatgtttgtattacgccaactagaatttggtctgtttgatttccgcctacacgctgaatatgatccggctaaaggtgctcgtatcatggaaatactaaatagcgtaaaagagaaagtctcggtagtacctgcaacaccttgggcgcgattccctcatgcctttagccatatttttgccggtggttatgcagcaggttattacagctatttatgggctgatgtactggctgctgatgccttctctcgcttctctgaagagggcatttttaatcgccaaacaggtcaatcattccttgataatattttaacccgtggtggttcagaagagccaatggagctgttcaaacgcttccgtggtcgtgagccgaaacttgatgctatgctcaaaggctacggcattaaaggatgatatgtgaatatctgtttactttgtgaagaaggcgctgataacagcgccttatctgctttagcgcaacgttggggattaattcacgacgccacacaaactatggcgttagtcttaacgcccactcaccttgaattgcgtaaacaagatgagcctaaacttggtgggatctacgtggattttgtcgcgggtactatggctcatcgtcgtaaatttggcggtggtcgtggtgaagcggtagcaaaagcagtaggtattaaaaaggattatctacccgatgtggttgatgcaacagcaggattaggccgtgatgcctttgtattagcctctattggttgtaacgtaagaatggttgaacgtcatcctgtggtggctgcattacttgaagatggcttgaaacgcgcttatctcgatgcagatattggtgagtggatgcaacagcgtatgaagctcatttatgcttcatctgcacaggcactcacgcaaattagccctacacctgatgtagtctatcttgatcctatgtatccccataaaaccaaaagcgcattagtgaaaaaagagatgcgggtattccaatctcttgtcggtgcggatgaagatgctgatgcattattagcaccagccatggcactggctaaaaaacgagtggttgttaagcgtcctgattatgctgagccgttaaataatcaacccgcacatgcaagtgtcaccaccaaaaatcaccgttttgatatctatccttgtatctagccatagataacccatagaggggcgtgtctccccctcttttcccgtaactttttaattataatatcgctatctattgaatagtatatccaccatcaatcaccagattatggccattgatcatatccgctgcagcgcttgctaaaaatacagccgcggcagcaatctcttctggctcagcaaatcgccttgccggtatttgcgctttcatctgttcacctttttcaccttcccaagcctttttacctaaatcggtcatcacaatagtaggggatatcgcattgatttgtaggcctttgggtccccactctagcgccatcacctttgtcatattgataatagcggctttacttgcacaataggcaatatgttctggtaaagcgataatacctgcttgagaggcgaggttaattatcttaccttgcccgcgttgtagcatatgctgccccacttgctgacacagtaaaaaagtccccgttaaattaactgataaggttttattccaatcttcaagagataacgattcggcgggagctaaagcgacaatacctgcacaattaacaagaatatcaatgcgatcgaactcttcaatgactgaatgtaccgcttgttttacggactcttcacttgaaacatcacaccagatccccaccgcactatttaaacgatgcgccacttgctcaacctgctctgatctatccaacaaagcgactttagcccctttttcgataaacatctgtgcgatagataagccaattccagccgcaccaccagtaataacagccactttattcgagagagtaaaatcaatttgcgtagccatataacctccagcttaaaaataaatagtcactcttttaagcatagcagatgaaaattaggcctaagagggaagagaaaatgattgaaacggtcagagcgagcgctatgcactcgcactaacttaaaaaattacagcacgccttgcgctaacattgcatcagcaactttaacaaaacctgcaatattggccccttgaatataattagtttgtttaccttcaccgccatagtttacacaagcgtgatgaatatccagcataatatgatgtaagcgagcatcaactttctcagctttccaactcaagcgtgctgcgttttgcgccatttctaatcccgaagttgctacccctccagcgttagcggctttacccggtgcaaacaagactcccgcctcaataaaagcatcggttgccgcaatggtcgttggcatatttgcgccttcggcaacagctttaacaccgtttttaattaacacttttgcggcgtctaaatctaattcattttgtgtagcacaaggtagtgcaatatcaacagcgacagcccaaggctgttgcccttcaagataagttaaaccaaactctttggcgtactcttcaatacgaccataattatttttaatttcagttaagcgagccagtttttcggttgtaaatccagcttcatccaccacggttccgccagaatctgaagcggtgaccactttcgcacccagctcaaggcatttttcaatggtgaattgtgccacattgccagcaccagaaacggctacacgcattccctcaagggacatgccgtgacgtttaagcattgcgttagtaaaatagactaaaccgtaccctgtggcttctgggcggatcaaactgccaccaaatgataaacctttacccgtaaagacacattcattgctattcgagagctttttcatcattccggccataaagccaacttcccttgcccccacaccaatatctcccgcggggacatcagtatcagcccctaaatgacgatagagctcagtcattaacgcctgacaaaaacgcattacctctgcgtggcttctccccttgggattaaaatcagatccccctttagcgcctcccatcggcagtgttgtcagtgcatttttaaaggtttgttcaaaacctaaaaattttaaaatagagaggtttactgatggatgaaaacgcattccacctttgtagggaccaatagcagagttaaattgtactcgccatgcgcgattaacttgaacttgtcctttatcatctaaccaacagacgcgaaactgaataatacgttcaggctcaactaagcgctcaagtaatgattgttcacgatattgtggatttttctctaaaaaaggccacagagtggtaaaaacttcacgtaccgcctgatggtattcaggttgatgagcgttatatttttctacctcttctaaaaacgaagataatgagccagatctattcattcagctattcctttttatgtaatgtgatgttggcataacctcatttattcggaatatttttgggatttatgtgaggttgatattgttttgcctattgaatatatcattaaaatgtattcctacttcaagacattttttttacaattagacaaaaaaaaaagcttgacctcactaaaggctaataaaatcaggatttttggacaaaaaaatacctgcataagcaggcattttttttgcttaaataatcagttgattactcttcatcatctttcagaggaacaattaacatatcaacatgaacggtattaattagttgacgtgctgatgacatcaatttgctccagaaatcttggtgatgaccacaaaccactaagtccatatcgtattttttaatcgcatcaacaagaacttggcctaaatccccgctaccactgagtgtttcttggatctcataacctgagttatcagagagatcttttagtgcattacgtgtttcatcagtgatgcgttgttgcatatcaccaaggttaacatcaattaaaccggtatacagatcagagtagttaacatcaacgtgaattaaggaaactttggcattatagggttttgccatagatacagctttctgcaccaagacgttgctctcaggggataaatcaactgcaactagaatatgcttataagccatcgtaaactccttccataagctgattaatcggtcggaaaggctattacgcctatatcctttacattaaatataacgttttatgatgaaagttagatgttgccttgatcacaacttagtgcaaataccatcaaagaaagcatctatcggtaacaacaatatacaccattttaaataagtgaggagtcgttcttcgacaatatccacatattaatgtgaataatgcacaaggcacaataaaaacaccctattagagttattttttaatcatttttttgaaaaagcgaacaacttgaacaactcgcttttatttcttgcttaatatcacctagacttaaataagagaaaaattaacctttccatgtaaatgcaaaaggttttctcatctcagaatcagctattctagggaggggattatgtttagtgtcattgttatcttttgggcgttgtgtattctttgcctgattaatatgatgcgttatttctcatcaattcgggtattactcaccatattgcgccaatctgatccattactttaccaatctgtcgatgggaatggatttttcactatgcatggtcaattttcaaaacagttaagacttattcgatatataaatcaacgccaatatactaaccaccatgatcctgaagtgattatgcgttgtgaacggatttatcgacaattctacctagtaagtcgcttttgtattcttgctgtagcaagcttgatcgccatgattatttggtaggttttatagggataaaaaaacggtgacgagttagtcaccgtttctcaatactattaggatgcttattattatcagctattcaccagcagtgaaagtgaaatccaataaagcacaccggataaagcaatactcactggtaatgttaagatccaggccagcgcaatatttttcacggttttggtctgcaccccaccaccatcaacaatcatcgtacctgcaaccgcagatgataacacttgtgttgttgatactggcatacctgtataacttgctacaccgatagaaactgcagcagttacctgagcagaaacaccttgcgcataagtcataccttttttaccaatcttctcaccgatagttaccgcaacgcgtttccaacctaccattgtcccgatagagagcgctaaagccacagagataatgatccaaattggtgcatattccactgtatttagcaggtcacgactcaatgtttttaagaaccgtgcatcttgggcgctagtttctggtagtttagcaacttccgtagctgtatcagcaatacacatcagtaagcgacgcatttgagcacgctggtctgcactcagctcatcataagagctaataccagacaacatttgttctgtttgattgagaacaattggcgttcttgcgctattacaatgaaaatccgtgtcgttaggatcagcttgtgctgatactaccggggtattttcaatcgcatgttgtagagctggttgatgcttctcataatactgttgtaagtgtacaacggcatcatgagttttagtgatatcgtatccgctagcattcatattgacgacaaaccctgctggggcgacaccaattaaaactaacatgataagaccaatacctttctgaccatcattcgcaccatgtgagaaactcacccctaccgcagataaaatcagcgcggtacgagtccaaaatggtggtttgcgtttaccatcttttttctcacgttcggcaggggttaggtggatacgacgacgttttttcgtgccactccaatagcgacgtaacaagaaaatcatcgcgccagcaatcaccaagccaataattggggaaaggataagagaaaggaagatactgatcattttaggtatgtttaatgcatcaacgattgacgagtctgtcacgatagcatttgttaaaccaataccaatgatagcacctatcagcgtatgtgaactggatgctggaataccgaaataccatgtacctaagttccagataatggcagctaacagcaacgaaaaaaccatggcaaggccatgagccgagctcacatttagcagaagatctgtcggtaataagtgaacaatagcgtaagccacgctcaatccaccgagcaaaactccaaggaagttaaatacacccgccatcacgaccgcaaattgcgcacgcatagcacgagtataaataacagttgctaccgcatttgcggtatcatgaaagccattaatggcttcataaaatagcacgaaaatcagtgctaaaaccaacattaaacctgtatgaaattccaggtcagtaaacaaatgtagcatagacgttaagccagttagttggacatgaacgcggcgcattatcagcgacaaatgcgaacggtggaagcgaaatttaacctttttttgatttgataaccaaggaaaatgacgggtttttaagataattccttatatatcatttaattaataaacataaaaaaaaagtaaatttctgataaattttttgcttgcaaatacgaatttaggtgaaaaatacagatttctccatataattttacaaaatactctgattttacacgaagatcactgattaagtagtcagagacaaccaagaacgagacatcattgtgggatcattcgatacagttattataggtgcaggggccgctggacttttttgtgcttctttagcaggacaagcgggattatctgttttagttttagataatggcaaaaaagccggcagaaaaattttaatgtctggtggtggacgttgcaattttaccaatatgtatatcgagccatcagcttacttatccgataatcctcatttttgtaagtcagcacttgctcgctatacacaatgggattttatcgagttagtacaaaagcaccatattgcttaccacgaaaagacgttagggcaattattttgtgatgattctgcccagcaaattgttgatttattactcgcagaatgccatgaaggaaaagtaagtattcgcttacgtagtgaggtgactcaaatagagaaaaccgccgaaggctttactcttttggtaggagggaaaacaataaccgcctcctctgtagtgattgccagcggaggactttcaatgcccggtttaggtgccaccccttttggctataaaattgcgcaacaatttggccttaatgtattgcccactcgtgcaggcttagtcccttttacattacacaagccacaacttgaacaactcagcccgctctctggtgtggcgatccctgctattgtcaccgctgaaaatggcacccaatttaaagagaatattctttttactcatcgtgggctttccggtcctgctattttacaaatctctagttattggcatgcgggagagaatgtgagcattaacttacttcctgacacggatttggaaggctatttacaagaaaaacgacaagcacagccgaatcaattattaaaaaatacactttctcgcctactaccgaagcgttttatagagataatgattgaaaataatcaactgcctgatacctcactggctcaacttagcaatgaacgtattacacaaataacgacgttgctacaagcatggcttgttttacctaatggcacagaaggttatcgcactgcagaagtcactctaggtggtgttgatacccgtaatctctcctctaaaacgatggaagcgacaaagataacaggtctctattttattggtgaagtggttgatgtcacaggttggttaggaggatataacttccaatgggcatggagctctgcttatgcctgtgcccaagcattgatctctcgacacatgactaagtagacgcgttatttttataaataaccacacaaagtataggctaacttattggttataatgatttttttaaaaacaaaataaaataactcgttaatcagtgagttaacgaaattggcattatttttttctgttttgattaaaaaaaacactttacaaatgatagtgagaaccattatcattaaatcactttcagatgcaccaccttcagggtcatatgaaagaacgacattgctcacattgcttccagtgttttactttagccagccgggtgctggctttttctttttgttagaatggacaaaatatcaacatccatataataaatatatatatttcaataactttatgctcattatctatgaatagatatgatattaaaaaattttagaaaccagtgaaactggtaaagaaagaggccatatttttatatcttttattcttgatttttctaataacgaaaaactaatttaggctaattacctaatttttagtataaaaatgaatgtgtatacattttatcatattattattatgatatttcttcttatacaacattagtgctcattcattaataaatataaaaaccaataaaaacaagaagataaatatgctaaataaaaatgatagagataagctaattaaaaataataaatataagaatataaagtttaatgtaaaatgtaatattcaagttattttgtttatttcattgatttcattagtttttatcaacaacgaaaacttacctctaaaatataaaattgcacttagcggtgggatgatatcttttatctatatatttagcgcataccattcatttggtagtctatatctagcaaacaaaataacatatgtatttataaaaataaaaataaaaaaactaatcacttacattttcagaaagtaataatctaaacttatttagcgattatttttacttcagagctagttaaaagaaaagataagaagccccctcctgaaagaagtttcaattaatacctaagtaatagtagcctcatactttatatattcacagtatcaattcaatgctcccttattcaaattatttggatcctcagattaaattcctccgcttttttacttagcttaattgcgtaaactgtgttcaacaactttagagaaggaaacacattatgatttatttacgcaaagcaaatgaaagaggccacgctaatcatggttggctagatagctggcataccttctctttcgcaagctattacgatgctaactttatgggattttccgccttacgcgtcattaatgaagatagagtgatgcccggtgagggttttggtacccatcctcataaagatatggaaattttaacctatgtgcttgaaggtaatattgagcataaagatagtatgggtaataaagaaaatgtacccgccggtgaatttcaaataatgagcgcaggtacaggtatcactcattccgagtacaacccaaatagtgataaaggcctgcatttttatcaaatttggatcatgcctgataccaccggtattacaccacgttacgatcaacgtcgttttaataccacagagagtaaacagcttattttgtcaccagatgcacgtgatggctcgttaaaagtgttccaagatatgacgctgtggcgttggaacctaaaaaaaggagaagaggcacaatatcagccagaagcaggaagaaatatttggttgcaagtcgttaaaggaaagatagcaattaatgacattattgcgaccaccagtgatggcatcgccatcgcgaatgaagatattatctatttcgttggtgatgaagacagtgaagtcttgctgtttgacttacctcctgtaacagcatagttgggctaccaacctaaagccactttttctcaaacaatttatttcactttgttttcttgttaactccctgagatgtctttcatctcagggaattttttatcaataaaaccaataactagcgtttagggcccacttttgttaacgcttgccctactggcgtatcagtatatttatcaaagtttttcacaaagcgatcagcaagatcgtccgctttaacatcccattgtgctttatccgcataggtgtctcgaggatctaaaatttcgctattaacgccaggaagcgctgttgggatcgccaaattaaatacaggcagagtttgagtctccgctttatcaatatcaccatttaaaatggcatcaattatcgctcgagtatctttaattgaaatacgtttgcccgtaccattccagcccgtattcactaagtaagcttgtgctccacaagcctgcatacgttttactaacacttgagcatattgtgttggatggagtgataaaaatgctgccccaaaacacgcagagaatgtcggtgttggctctgtcacaccacgctctgtgccagcaagtttcgcagtaaagcctgataagaagtgatattgtgtttgctcgggtgttaaacgagcaaccggaggtagcaccccgaaggcatcggcggttaagaaaatgacttttttagcatgacccgctttcgataccggtttgacaatattatcaatatgatagattggataagatacacgggtattttctgtttttgagccgtcatcaaaatcaacactaccatctgctaataccacgacattttctaataaggcatcacgtttaatggcaccgtaaatatctggctcagcttcttttgatagatggatagttttagcgtaacaacctccttcaaagttgaatacaccatcatcatcccagccatgttcatcatcaccaatcagtttacgcttaggatctgttgataatgtcgttttacctgtccctgacaaaccaaagaaaatggctacatcaccactttcgccaacgtttgccgaacagtgcatagaagcaataccctttaatggcaggaagtagttcatcatagagaacataccttttttcatctctccgccataccaagtaccaccaattaactgaatgcgttcagttaagttgaaagcaacgaaattttcagagtttaatccctgcgctttccaatttggattggtacatttagcaccgttcatcacaataaagtcaggtgtaaaattttctaactcttcttgcgtagggcgaataaacatattcttaacaaaatgcgcctgccaagccacttcggtgataaaacgcacttttaatcgcgtatctgcattagcaccacaaaaggcatcaacgacaaacaaacgtttgcctgatagctgctcagtaactaatgattttaaatcagcccatacttgcggtgaaagtggtttattatcatttttacctttgccctgatcagcccaccacacagtatcacgagtaacatcatcacgaacaatgtatttatctttcggagaacgtccagtaaaaatccccgtatcaacagcaatagcgcctaacgaggttaatgtgcctttctcataacctgttaatcctggcttagtttcttcttcaaataataagtcatagctagggttataaatgacttcactaatgtcatgaataccgtactgctcgagatccttaggggtaagacctttaacgttcatagttttgctcctgataaataggcttttctatgagcattattaaggtgttacaactaattaacagcgattgttatcaatattttgaaaatttatattttttttatgttaataacgagaactaatgcacaaatctacagaaaaattgttgaataaaaaaggacgcaaaatagcgtcctttagggtgatttacgttgctaaatcgaatcagtgcaaattagagctagataatttattgatattattaatatcttcttcagtgaagatataatgagcaccgcaatattcacactccatatcaattttaccctgttcttgtaacagatgagctacatcttctttagataatgttactaatgtatcttcacaacgtttacgagagcacgtgcaatggaacgctatcggctgtggatcatataatgtcacatcttcttcatgatataagcgatgtaaaatctctttagtatcaagtgtaaacagctcttgagccttaatggtgtgcgtaagttgtgttaatagctcaaagtgttctgctgtctcatcagcactatgttctgcactcgcaggtaaggcttgtaataacatacctgcacccgccgcttttccatcttgcagacctgtgcggataaagacacgggtaggtaactgctctgattgattaaagtagttatcaatacaagcttctatcgtttcaccatccaacgctacaataccttggtaacgctcaccttttttaggtgtgatggtaataaccataaagccattgcccatcatctcttttaagctgctaccggctttaacatcatcactaaaacgtgcaacaccgcgcatctgttgttcattattgccgttaataaccactaatcgtactgggccatcaccttgtaattgaacggtaatatcaccatcaaatttcagcgtagctgttaacaaacttgtcgcgaccaataaatcacctaacaggtgttgaactggctcaggataatgatgattttcaagtattgattgataggtttccgttacggtaactaattcaccacgtaccgcgcttttttcaaataaaaagcgtgataaagcgtcttttttagacataatcttctctcattgctggggagcggtttaatccgatcctggtaaatttgtctgtttcaagcgaagtaaggtgcgtctttcctttttatcaggtcgacgttcgggatgaggcatcgttaacgcattcatttttcttgctagagcgattttttctctcttggcaatactctctggtgtttcacaatagagcaattgtgcttgggccgcccctaggcgctgtgcactcaccattaagactgtaactgtccgttcatcattaccttgtcgtaagcgtatttcagccccaacttcaacatttttacttggcttgcctcgcacaccattgtaatggactttacccccttcaatcatagtgcgagcaatggcacgcgttttataaaaacgtgcagcccaaagccatttatctaaacggacagcgctttcttgcgatggttgactcatccctttctctccttaacttcaacttcttcatgaaggcgatagagtaaacacattgccttccacaacaaggaacttactgaggagggcgataaaaacagtgctcgtaatattgactgattttatgcatgcgttgattattttgtcgccggcgccggatgataaaaaataaattcaggatcaaaaatccaatagcaaagaataataataacgtattaccgatataatataacagggtcattgagtcaggcatgctatgcaaaaagatttgtaacgtgccattcgcatcaattaccatccccgttattacacctccagtattaaaaggtgtgtgtaataaaatatcagataatcgctgtaattctcgccattgctctaatggtgtaggttcaaatacagagttggtatttgaagcataatcaacgagctgttttctttcatcactgattaaaagcacaccacccggtggtggactatttaacagtattgcggccttatctatttctcggtagataaaagatgatgtggtggtgtcaacgagcttttccaaggcctcagcactaacagcacgtaataaaacattggttcctgttaatttgccactttctgcacgttgaactaatgatggccaatcattgacattacttaggtttaccaaggccattttaagccgaatacattcattttctctcgggcataaatcttgtgttttcaagataatgccatcaaaattatccaaaagattcatgccagatttagtaatagcttgacctaagcttgggtttacacggttgttagaaacggggtgtagctgctcttcaaccaaatataataatgctgccgctttttcaatcgtactagactcaggcattggcattgggttgctgttgttccaataaatccccgaacaatcaaaaggtgcaaatattgttttattattcttactggaaaggtttggaggcatataacacattccgacacctttggcctgaataatatcccctacatgcaacttggccgtttctaactccgtaaagttagtcactaaatgaggttcactctcttttatccatgaaaaagttaacttcattgataatgataacggttgatagagatacagcatacctataataaataggctacaaacaacaaagataatatttttaatgtaacgcttatacggatagtttttttcttcatcatgcaatgataaataaggcccttgcttgataacatgatgattaggatacatttctaaataggtcaccttatcaatatcattttgaatataaggttcccaatgtggaggataaactaaatcaattccccccaacgaaatattttttacctgcccatgatcaaaattaccaaacagtccccagcgttttaaacgccctttaaaacattgtacttcttgttttcgtgatttgatgatgggtcgataaataagaaacaagcctaaaacaagaaaagtccctcccgcagccattatccaagggagaaagacttgtggcatcattaatgccgttaaccataagattaaccctaagcaaattaacgagccattccaaaaacctgaagaatgatgtaaccgatactcttcgttggtttcttggcgaatatgtaataaatgcgccgcatcaccttcatttttctggatagtggaagtgccatttgacagtatgggttcagaaagttgttttaaacttaacgcagaaaaatgtgatttttcatctttaagaaaatggccattcacaccaatgacaatggggatagaaggagtacaaacgacatcgaggacattttcttgttgcagataaggcaccagtaatggaggaatatggatctctaccgcatcaatgtaatagcgccaatgattgagcccctctgatgatcccgcaaaccgattaacaatattacgcagtgtcgtaacgacttcacctttagtgggtatttcaggaaagttttgtaacgaatacccagaagaaaacttagaggtgccaaaataggacaaatagtcactaattaccccataatcatcttgtgttagtttacggtaagtcggtttggcgagggatggaagatgatatgagccatcaagccgccttcttttaaagaatagaaaggcggccattataaataggctaatcatgaagatagccaatataatgactgataatctcattttttccccatactcatgctggtgttgcttagtaacaataacaaatttgaaatgccacctaacataaggcaattcctattctttagttctatttttttattaaaatacaatgaattatatttgtgttgttgcgttataatttatatatattatcaattttatatccgccaaccatgccattttcagataaaatagcgcatcaataaataataatactcccaaaaaatcaatcaataactgggtttagtagcggagtgtactcaattttcactaaaaagctaaatctaattgttggatttattttatcattaatgtgttaaattcaggttaatctctattcctatcaggggctgttatgaaagaactaaaaaaaccgaatatactcaatattgataacattgcccgttctcggttatttcagatccaatccgttaatctggaatttagcaacggcgaaaaacgtatttatgaacgaatgaaacccgctaaccgggaagcggtaatgatagtccctatcatcaatgatgacctgatccttattcgtgaatatgctgttggcatcgaaaattatgactttggctttcccaaaggggctattgatgcgggtgaaaccccattacaagcggccaatcgtgaattaaaagaagaaattggctacggtgccggctctttaaccgagatagctaaactgtctatggcgccctcctatttttccagcaaaatgaacattgttattgctcaagatctctatcctgaacaattagaaggcgatgagcctgagccgttagttcaaatacgttggcctatcgccaagatgatggacttattagatcatcccgactttaccgaagctcgtaatgtcagtgcactctttttagcacaacgttatttgcaacaagtttgtccaaaataataattggctcgcgatatccagataaaattaaggccaccaaatagggaggccttgatatctatcatctctttttattagaaaatagcgcgttaccacgctttcaccgcatcacctttataaacttcttgcgctttttgcaaaatttcatcactttggaaaaccgcgacgagtttttttaatcgttcgttatctttgtctatggctctggcaacaatcaaattaacataaggagaatcggtattttccataaataaaccatctcgtttggctaataatcccacttgtgaagagaagttattattgatgatggaaaggtaaatattaggatcacttaacgtacgagttagttgtggtgtatcaatttctgcaaatttaagtttcttagggttttcaataatatcaagtgtcgttggtaaataccccaccccatcttttaatttaatcaatccttgagcctgcagtaataataaactacgacctagggtggttgcttcattagaaatagcgacagtagcaccatcaggaagcgcctctatggttttgattttatttgaataagctgcaataggaaaaataaaggttttacctatgatttcaaattgataaccacgctctttgctttgagcttcgtagtaaggtacggtttggaacgcattcacatcaacatcattattacgcaaagcttcattaggtaacacgtagtcattaaaggtgatcaccttgatatctaatccctgcttttcttttgccagcttaacaacttcatcccaaatttgctgatctggccctgtatttattgccacttttaacggtttatcaccttcatctggtgagcaagcggttaaaaccaatgaagtacaggccaaaagcaccactaataataattttctcatcttctctccaataatcgaccatgtcactcttattatttataacttattgttattattaagtttaatgtttttattatgctatcaaggggactacttatactatataacaacacgtatttagacatctagacgtttagatagttatttataacgggaaagagtggagagatcaaaatagatttacacacaaaacatgaaatattttcatgttggaagatgagatgtatctatatctatttattagataacaaaaagcgggaaaaacaatctgttatcccgctttagttattcgttagatcgctatttaatctaactttttgtttattatattaatcaaaatagctcgttagattcgccattatcctcaaagatccgtgtacccacttcactttttgctttttctgttggctgagtgccttcaataaaatactctttcattgatggtccatctcccgccaacttaccggtattgcgatcgatttgaacagcaacaacgccttttggcatcggcatcatttgtaccggaacaccttctaaagcaactttcataaagtcattccaaataggttgtgccgttttggcacccgcttcaccacccgttgcggcagttcgccctaaattgcgactactatcatcaaaaccaatccatgcagtcgccacaatattagcaccatatccagagaaccaagcatctttagagctattggtcgttcctgtcttaccaccgatatcttgacgttttaaatctcgcaatgcacgccatcctgtaccagaccatcccggctcaccaacgagattggttcttaacgcatcatgcattagaaacgccagtggcgtacttatcacatgaggagcatatgggctttctttgactgtttcagcaagaggtgcttgctctaactcaatatcaggcgccgtttctgccggttgcgcttgctgagattgtgcgacgttttccatataatcatcagataatgcaatagagcgcgtagtatcaccataaatcacggggatatcggtacattcaggacaagcgactttcggctcagcagtaaagatcacttcaccatcagcattttcaatacgctgaataaaatatggctcaatgagatacccaccatttgccattaccgcaaaacctcgagccatttgcattggtgtaaatgaaggtgagcctaaagctaatgactctgttctatctatattttgattaggaaaaccaaaacgcaatagataatctgcagcgtaatcaacccccatcgcccgcatagcgcgcaccataactacgtttttagattgacctaaaccttgacgtaaacgaataggccctgcataagtaggtggtgagtttttagggcgccaatcagttccagctcccgcatcccaacgactaataggtaagtcatttagtaatgtcgataatgttaaccctttatctaatgctgccgcatataagaaaggtttgatatttgaaccaacttgacgtaacgattgagatacgcgattaaacttactcaattcaaaatcaaaacctcccaccagcgcaataataccgccattaagtggatctaatgcgacaaaagctgcattaacctcaggaagctgtgctaataaccaatcgttttcactattttgtcgtacccaaatttgctcaccagcatgtacaacagcatcaactttgctcggcgtggccccttgagccgtatcagaaataaatttacgcgcccaacgaaccgcttttaaatcgagtgttattttatcgccattttttaataccacctgagcttctttagcatcagcggataacaccactgcggggattaatgggccataagtctgtataccctttagcttatcgttaatggctttatcatcccaaggagtttgccctgcatgccacagcacctcttgagcaccgcgatagccatggcgcatatcataatcaataacattattacgtagcgcttgttcagcggctaattgatctttgcggataactgtagtgtaaattttataaccatccgtataggcattttcgccatagcgctgatacatctccattctgaccatttcagtcaaataaggcgctgaaaaatcaatttgtggggcgtgatatttagccacaataggctcagctttagcactgtcatactcttcgcgggtaatatagttctcttccaacatgcgttgtaacactaaattacggcgttttaaggcacgatcatacgaataaagtgggtttagtgtcgaaggggctttaggtaaacctgcaataacagccatctcacttaagctaagatcatgcacacttttaccaaagtaaacatatgcagcagcacccacaccataagcgcgatttcctagataaattttattgagataaagtgccaagatctcatctttagtaagctctttctcaatacggatagccaaaaaggcttctttgattttacgcattaatttcttctcaggtgttaagaagaaattacgcgctaattgttgcgtgatggtactggcaccttgcgatgcttgccccgatgttaacgcaacaacaacagcacgagagatgccaatagggtcaataccatgatgttcacgaaaacgcgtatcttcagtggcaataaaggcattaattaattgcggaggcatctcctgcaaggtaagaggcaaacgacgtttttcgccatattgcgccattaactctccgtctgcgctaaagacctgcataggagtttgtaaacgaacatcttttaatgtcgcgacatcgggtagttgaggctcgacatatttatacatgccatatatcgaggctgctcccaaaattatgcaagcaaaaacgaagatgaaaaaatattttaagaacttcaccttaaatttcccatgtaatgtgaattgggcagtttataaacaaacagtgcgtagtataaaggtaacgcctcttggaaaataggctattacacattcaatagatatggatatcatttatgaaaacagataattatcagattggtattgaaattaatatcaatcatatcaatgccgttttagtatttcagcagaataagcaatggaagatcaatgcattttggcaattccctttacctcttaatgataatatagatgatataaatttaagaactatcttaaaacgatggcaacaatctctaccgccaatcaaccgtgttgcactggcattacccgatacagtggcaagttatcataccattgctttatctaacctgatttccctgacaccagcagcctattatcgattagcacaactccgagccacatctcatcaacaagtcaccaaacaagcggtacaattcgattatcggcaacataaccaacatctcgccatccatttacataacaagacactgatagagacttatattgccttattcgccaaaataaacttaaccatcactgcgattgatattccagcttgtgcgttgcgttatgttgccacacatctcaacatatcgcctcacagcatattaattttttgtcaaaataatcaaatgctttgggtttgtgcagataaagagatgccccattacggtactctttcttatcaagaccaccaagagcaagaaaaacaattacagcaattactcatcaagcatcattggccacaggagcaatgttatttctcaggtgacaatgcagaatactttcgccaacaaatgcctatttggccaacccaaaaagagcggctatttatgtctataccgcccaaaaagacgctacctctaattgccattggtttagctttgcgtccttgggagacagcatgtatcaaataaattttcttccttggcgtcaagccttatatcgacatcaagcacaacggtggctttattggagcatgatactcgttgttattacattcagtgcttgcggttactacgcttattatttagtacaacaagtaaaaacactctcacttttacaatcacaatatcaaaaacgtgagtactcactacaaaagcaatatcacaatgaccaacatgaacagaaagtcacccgcttatatcaacagcgttattggcattattatcaacattggcttcactatttaagttacctcgctttctttcaagcactagaaacactgctccctacggaaggttatatcgcgcagttttctgaaaatgatgcaacattttcgcttcaggtgcggcttccttgtgagcaggcacttacttttatatctaaagttaaccaacaccccaacctaacatcattaacactctcctcttttcaacagagcaaacaagatccccgttacagcgaaataaggttttctggtaagtggcagagttggcaatatcaagtatctcaacataggcatagcgaacaagatgtcgataacaatgaaaataaagactaattgggtaatttatttcgtccttttacctttttggcaaaaggcactcttaagtttagccccttctataatagtgagtttgttatgttatttattcagcttttcgggctatcagcaggacataaccgcgcaacaacagcttattagccaacaccaaacgcagatacaacaactgcagtcgatattgcattcgtctcctgctatagccttattaaaagcgttacaacatgactataaacttccaccacaaacaggctcagcctatcagcgtttacaacagataatcgataaccatcacttgatacctcatagttggcaacatagtgtcgataatagttttaagctacgtttttcactctcttactcacaattactaacgttattagcgcatctacatcaagcaggttgcgctctttctgcactgctcatttcgcctatcccccctgatttactctcagttgaattgaatttagtcgacataacgacaccaaatgttctagcgcctttgaagtcagagtgaaatattatgaaaagcgtctttttttatttgctgttactactatctattttgtgctttgctggttttgctcaatccagagatcctttttatccagaacaacctattgatagtaataacactcaccatttcattgataaaacagataatagtgaaactcttcaacaccaaaacagcacattacaccatcgtatctacccactacagtatgctgatgtaaccaccgtggcacagcagttaacgaactatggaatttcattactcagtgatcatggacgaatagccatagataaagattcaaatagcttatccattattgatacagaaaaagcacatactgaaatttctgattggttaaaaattaaagaaacaccacagcaacaggtgcatattaccgcacatatcatcagtagcagtcaggatgcgttaaatgagttaggaacgcagtggggattactcaatatgaaatcggcaaatttagaaggtacatcaaacaatactacaacaccccataacatagcatcagcaccgctcacagcaccttctcttgccgcattggcactgcatcaaaaaacaaaaaaccccttacattacatagcctttaatatcgccagaattaatagtcgccttttagaattagaactaagcgccttagaacaagagaaacaactcgccatcattgccagtcctcgattaacggctgcacatgaaaaaacggcatctatcaagcaaggaaccgaaattccctatgtcagcagagataacgacaccatccgagttgaatttaaagaggctgttttggggatggaggtaacgccgatcattcaaagaagcaataaaattagattgctattaaaaattagtcaaaacacaccaggtattgccttagtacaaggaggtagtgaacacctttcaatagataaacaagaaataatgacagaagttactattcatgatggtgagactctgatgttaggaggaatatttcaacaaaagcagcaacagcatgcagcaaaaattccttttttatcttcactgccattactagggatactttttagccataagcgtgaccaacatagtcgtcatgaattggttatttttattacacccaaattaatctaattttcttcgtgtgatttatttttttattataatacaaacaattaccttatttctgccaagataaaactgtaagttattcattgttttttcttataatctctatttatagatttgacgctgaggacgatttagcttacaagggttagctaattgagtgggcctgaaacatcacaacgataatacggatacattttatgcacttcctctttcttggaggtagggctttttatatgtaatattgatcaactgatgacagaaaagacaaagtgatcagatgcggttttccggctaaattgtgttagaatctccgcattgccaacaaagataatataatttttataggtcatatcttgttatgtactgtaggcaaagggatttttatcctgtgttgtcgcttgcgacaacacgtggttatttaatagcgttctactgaaaaaactcagttttaatatgagagtagatacacacgttatcaggcgtgaatgaaataaacactcataaatttcagtttaggtcccgtcgctgaatgaatttggcggggcgggttatcattaacgaatatcttagtaataccaaaaacatggcagagaaacgtaatatctttctggttgggcctatgggtgccggcaaaagcactattggtcgtcagttagctcaacaacttagtatggaattttatgattccgatcaggaaattgagcgacgtacaggtgcagatgtaggttgggtatttgatgtagaaggcgaagaaggcttccgtcaacgtgaagaaaaaataatcaacgaacttactgaaaagcaaggcattgtactggcaacaggtggtggttcggtgaaatcaagagaaacccgtaaccgactatcagcacgcggtgttgttgtttatttagaaaccaacattgaaaaacaacttgctcgtactcagcgagataaaaaacgtcctttattgcaaggtgttgaacccgtacgtgatgtactggaaaccctcgcagaagaacgtaatcctctttacgaagagattgctgatatcaccattcatactgatgatcagagtgcaaaaatcgttgcaaatcaaattattgaattattagagaaaaactaataaattctttagatgagatgaaagtaaagactacttgaagaaggccgttgctatggaaaaaatcactgtgactttaggtgaaagaagctatcccattaccattgcttctggcctttttcaccagcctgaaacctttttacctttaaaaaaagggcaacaagtgatgattgtcacaaatgtgacacttgcgccgctctatctagacaaggtaacaaacaccttagaacaacaaggtgttttggttgatagcgtgattttacctgatggggaacagtataaatccctaacggtaatgaatgatgtctttactgcattattagaaaaaaatcacaatcgagatacaacactgctcgcactagggggtggtgttattggtgacttaacaggctttgcggctgcaagttatcaacgtggtgtacgttttattcaagttcctaccacgttattatcacaggtcgattcttctgtcggtggaaaaacagcagttaaccatccactgggtaagaatatgattggtgctttctatcaaccggcatctgttgttatcgatctcgattgtcttgcaacgcttcctcctcgtgagttgtcatcaggcttagcggaggtgattaaatatggcattattttagataaagacttctttatctggcttgaaaacaatattgataaactgatagcgcttgaacctaaagccatggcttactgtattcgccgttgctgtgaacttaaggcacaagtagtcgcagcagacgaaaaagagacgagtggtctacgagctttacttaatttaggtcatacttatggtcacgcaattgaagcacatatgggatatggtgtgtggctacatggtgaagctgtcgctgcgggtatggttatggcggctaaaaccgcacaagatttgggtcaatttactcaagcagaaactcagcgagtgatccaattacttaaaaaagcaaatcttcccgtcaatggccctgatgagatgcaacctgaagactatttacctcatatgatgcgagataaaaaagtttccgcgggtaaattgcaccttgtattaccaaaaggtatcggtcaatcagaactacgtgcggatatctctcgcgaacaagtgtataaagcgataacatcatgcattaatgcaaattaagcataccatcacctaacgagagataaactggaaagtctatttaaggaaaattctggttaataatctcaaatgtgacgtttcagaaaaagcgtttcatccttatactagaggtaatggctaactttcgctttttgacgctctgacggagggcataatggacgagttcaaacctgaaaatgaaattaagagtggcgataactcactcaaacctgatacttcggatagacccgaacgtcgcactaatcgacctcgtaataacccattaaaaaatgctcgtttctctgtatcccgtcaacagatgatgataggtgttggggtactggttctcattcttttaattattgcgataagctctgcgctgaaatcaccagacagtgataaagaaacaacggcctcaacaacaggaacagaaaagaatattgaactgtctcagccttcagtaacatcaacaaacaatcaaacatccacacctcaggagctgacgggtcaacaaatacagcagcctacaacgcagccatctcaaaatctccccccaatgattgactctcaaggtcaacgtgttgagatcccaggagatattgttgattcactcaatcaacaacaagcaggtgttaaccaagctgttaatcaacaacagcaaaatacacaaaaccaaccgacaacgccacaaactccggtgaccaaaccacaaccggcaccaacacaaaaaccagaggtcaaacctacaccaaccaagccggtaacacctcctgcaaccacacagactaagcctgtggcaaaaccaaccacaaaacccgttgcatcaggagccttatcagcaaataacctagcagccattcctgcaacaaattatactttgcagctaagtggtgcgagtcgccaagatacgttagaagctttcgctaaaaaaaatcttaatggaaactacgctatttataaaacccagcgtaatggtaatccttggtatgtactcatctatggtaactatcgtaatataagcgaagcaaaacaggccgtggcttcattaccggcggctgtgcaagctaaaaaaccttgggttagacctatgaaacatgttcatcaggatctaaaaaaataagttaacgatgttcaccgctgatatgctgtctgaaacagagtacaatcggcgactctgaaacgattgagaaatttggacggcatgaaaaaaaaacgcgcattcctaaaatgggctggtggtaaataccctttggtagatgacattaagcgtcatctacctcaaggtaactgtttaattgaaccttttatgggtgctggctctgtatttttaaatacagaatatgattcatatattcttgccgatataaatagcgatctcatccatctctataatacggtaaaactgtatcctgaaaaatttatgaaggatgctcaactattattcactccccagatgaataatgcagaagagttttatcaactacgacaagactttaatcaatcaacagatccataccaacgcagtgtgctttttctctacttaaaccgtcattgctacaatggattatgccgttacaactccaaaggtgaatataatgttccttttggtcgctacaaaaaaccttattttccagaagacgaattgatttggttttcagaaaaagcgcaaaaagccttatttgtctgccaaagctattcatcaaccatgacaaatgccaccaaaggttctgttgtatactgtgatccaccttatgcaccgttatcaccgacggcaaattttacctcataccatacaaatagctttagtttccaagaacaacagcatctagctcaacttgcctcaatgttggcttacgagagacagatacccgtgttaatatcaaatcatgaaactgcgttaacaaaagagtggtatgtagacgcgaaagagctacatagtgtgaaagtcagaagaacaattagtagcaacacactaggtcgtagcaaagtgaacgaattactagccttatataaataatcgttaacacttcccgacaatgggagtgttgtcaggagaacgcgatgaaagattttctgattgccccttctattttatctgcagatttcgcccgccttggtgaagatacggagaaagtgctcgctgcaggtgctgatgtggttcattttgatgtaatggataatcactatgtccctaacttaacgttcggtgcaccaatttgtaaagcgctacgcaactacgggatcacagcacctattgatgtccacttaatggtaaaaccggttgatcgtattattcctgattttgcacaagcaggagcaacctatatttcatttcatgccgaagccagtgagcatgttgatcgcactattcaattaatcaaagattgtggctgtaaagcaggtttagtccttaatcctgccacgcctctcaattatctcgattatgtaatggataaattagatcttattcttctgatgtcagtaaaccctggcttcggtggtcaatcatttataccaaagacactcgataaattacgtcaagttcgcaagatgattgatgatggtggctatgacattcgtttagaaattgatggcggtgtcaaagttgataatattgccgaaattgctcaagcaggtgcggatatgtttgttgctggctctgctattttcaatcagccagattataaacaggttatcgacaatatgcgccgagaattagataaggtatcgaaatgacagaaaaaaaactcaaaggtattcgtgctatcgcttttgatcttgatggcacactaactgacagcgctgttgggctaacagaagccacaaactatgcactaaaagcaaaaggcttcccaacagtggataaacaccatgtcaccatttgggttggtaatggtgttgatatgctattaaagcgcgccctgcaccattgtggtgttaaagatgtcaccgatactttattaaaagaggtacgtgatctctttgatgagtgctatgcaaactctgtcaaaacaggaagcaatctatttccacacgttaaagagacactagaaaaacttgcttcgtattctctctctttaggcatagtgacgaataaacctactccttttatccaaccactgttaaagcaattaggtatagacaacgacttctcattggtgcttggtggtgatgatgtaaaacaaaaaaaaccccatccagcgccattatatttaacaatgggcacgtttggtgttaaaaaagaagagcttctttttgtcggagattcccgtaacgatattatcgccgctcaagcagcacagtgcccttgtgtggggttaacttatggttataactacggtgaacccattgcagatagcaaacccgattttatactcgacgattttgctgatttgctctctatccttgatattacgtcaatgacaacagtggaacagaactaacatgacgacttcagtagaaaaaaaggctcaaaagcctattgtattcagtggtgcacaaccttctggtgagttaactatcgggaactatatgggagcactacgtcagtgggtacaaatgcaagatgactacgattgcatttactgtatcgttgaccaacatgccatcactgtacgccaagatcctaccgaactgcgaaaaagaaccttagatacactggctctttatctcgcttgtggcattgatcctgaaaaaagcacaatttttgtacaatctcatgttccacaacatgcacaattaggctgggcgctaaactgctacacctactttggtgaattaagccgtatgacccaatttaaagataaatcagctcgtcatgctgaaaatatcaatgcaggattatttgattatccggtcttaatggcagccgatatcctcctttatcaaaccaaccaagtacccgttggtattgaccaaaaacaacatcttgaattaagccgtgatatcgcccaacgctttaatgccatctatggggacattttcaccgtacccgatccttttattccaaaaggtggcgcacgcgtgatggcattacaagatcccgctaagaaaatgtctaaatctgatgataaccgcaataatgttatcgctttacttgaagatcccaaagcggcggcgaaaaaaataaaacgtgctgttacagactcagaagagccacctcgcgttgcgtatgatctagaaaacaaagctggtgtttctaacttattagatattttagcgggtgtaacaggtaaaactatccctgaactcgaagctgaatttgaaggcaaaatgtacggtcatctaaaaggcgcggttgctgaggctgtatcagatatgctgacaaatattcaagaacgctttaacaccttccgtaatgatgaagcactattaaataaaatcatgaaagaaggtgccgataaggcaaaagcgcgcgctcaaacaaccttagataaggtttatgaggctattgggtttattgctcacccataatcgttattacaggccagttgacatcctccacgccctaaaggacgtggagccctactgcgttcagactgatgtctgaatcacctcggcgggttcctgcttcgacgggcggtctgactgcaccctccctccactggcaagcacggcatgtcctgccgctaaaatgttacgtgccccgttgatatcagcattcgctgtatatccacattcaaggcactcgaattgactttgtgacgggcggttttcctttgctgtatgaccacagcaagcgcacttctgactggtgtaggctggtggtattgccagtacctgacctcctcgccagagctgcttgtactcaagctgacggcgcatttcataccagccctgctccagtattgagcggtttaaaccagatttagcttttacgttccgtccaggccgttctgtcgtaccttttgccgatttagacatgttactgacctttaagtcctcaatgacaatcattgcgtggtttttgctgatttcgctggtgactttgtgaaggtagtctttccttatattggcaatatgagaatgcagacgttgaattttgcgcttttgtttttgccagttggcactgaatttgattttacggcttaatttccgttgaagccttgccagctttcgctggttgactttaaaactgctgacgggcgggtataccgtaccgtctgaaagcgtggcaagttttgtaacccctgcatcaagcccgactattgaggttgattcatgttgtggttctgtcgcttcatgctcagtctgaatgctgacgtaccatttaccgcatgactgactgaccgtgacgtttctcacttctccgacgacttcacgactgttgcggtagcgcatccatcccaactttggcaatgatatacgactattggattgatcgagcttcacgccctgcgggtagcgaaaagcatcatttttaccgcgtttcttgaatcgaggaaaagcggtacgcttctggaaaaaattcttgtaagcccgttccaaatctttaagtgactgttgtaacggttgtgatggggcttccttcaaccattgtgtctctgtgtcagatttccactcaatgagccatgaagccatttttgtatagggaatgtatttattccctgcttcgtgctcctcattctgacgtgctaatgcccgattgaaaacaaaacgacaagcccctgcaaagcgtctcatctcacgctcttgctgaccattaggtcttaactggaatttaaaggcttgtagacgtttcatattatctattatactttggtctatgaaaaatgaaactaatattcgccgtggcagacattgtgtattcctgatgcacgtccatttggtctttgtcacaaaataccggcgaaaaatatttgatcaggatgcaattgaaaaattgcgaggctactttgccagtgtttgtgctgattttgatgttgaactggttgaaatggatggggaacgggatcacgttcatttactgattaattacccgccaaaactggcgatatctaatctggttaacagccttaaaggggtatcgagtcgattacttcgacgtgatcgtcctgatattgcacaacgtgattactacaagggggttctttggtcgccgagttatttcgcggggagttgtggtggcgcaccaatatccattatccgccagtacattgagcaacaggaaacaccgagttagttaaaaaaccacaccttatatccccgacctgaaggacggggttttacggtgctttggataactgctggcctattttctgactatttcttaaatagccttctatcaaaactttcaatagtttgtttttgcaatcttaactgcatggttttacaccaactagcggatagtcctgccgctgttaataagcgacgatacgactcctcatcaaatggcatatgaaaagcaatagcaattgcttctttgaccgagatatcgctatttcttgagcgtagaaccaaaggatgatgacagcctacttcgccgggacttatcacgcgatataaccagccacaaaaaccgctatcttgcatcagttgtgaaaaatcgctgatatcagtcaccgtgtttaacttataacaaggtgaacgaggctgggtcacttgaattaaagcgtcaccccattgatatatatcaccaataaaaacattctcttctgtcagaccggtagtcgaaatattttcaccaaacgcaggagcattaaataagtcagccagttgaggaaattgctcagaccagtaatgataatgttcttgaggataatggcacaaagcgcgatcaggcccaccatgaaaccctttttctgcttgctcatcacctgctaagcccagtgatgttagtttaatatgcccatccaccagccttttggtgatcgcactggtaaatccatttgcagtcgtcgtgatattgccaataaaaacactggggaaatagcgcataactcattgcctcaatgaaaaaaagtccttttataataaagagagcaggctaaataaacaatgccgacaataattgtcggcattgataaatagagagaaaagagaatgatagcgatattatgctttgctctgatagcgtttttgcgcctcatcccagttaactacagaccagaatgctttgatataatcaggacgacggttttgatatttcaagtaatacgcatgttcccatacatctaagccaataattggatagccagatgcacctgctaactcttcacccattaatgggctatcttggtttgcggtagaaacaacagctaattttccatcatcttttaatactaaccatgcccaacctgaaccaaaacggctagcagcggctttttcaaacaactctttaaatgcatcaacactaccaaaatcacgttcaatggcatcttttaatgaaccatgtaattgagtgcctagctttaatcctttccagaagaaagtatggttagaatgaccacccgcattgttacgtacaaaggtacgttgatcagcaggtactttatgtaaatttttaacgagttcatcaatttctaaacccgctaattcaggcagtttttctaacgcagtattggtattgttcacataagtttgatgatgcttagtatggtgaatttccattgtgcgctcatcaaaatgaggttctagcgcatcataagcataagggagtgcaggtaatgtatagctcatattaatctccagtgctgttttatattcgatcacgccatgtgatttatctctttattatagtgaaaaaaatgttaatgaaaatcattatcatatccatattatttttgtggtttttttatccaacccagtgacatcaattttcacagtattttattttaaataaaaagcttattattggtttaatatttcataaaatacccaaaaggtagataaattatacataacaacctttagcactaattgatcacgccatgaaaagcatttccattatttcgtgatcttatgcgcaaaaaagaaacaatgtctctttaccctcttttgttaacgactttttgacatagtattaacaacagtaaggagaacaattatgacaaaaataaaccaacatcacattcctgcaaacattgcagagcacgccctgattaataaagagcaataccaaaaagattatgcattatccatcgaaaaccctgaggccttttgggcagataaagggaaaattgttgattggataaccccctatactattgtgaaaaatacctcctttgatccaggccatgtccgtattcgctggtttgaagatgggcaacttaacattagccaaaactgtcttgatcgccatttagaaaaacgcgcggatcaagttgctattatttgggaaggtgattcccctaatgaatcgaaaagcattacctatcgccaacttcatcaagatgtttgtcaattcgccaatgtattaaaaaaactgggtatcaaaaaaggcgatgtggtggctatttatatgccaatggttcctgaagcggctgttgcgatgttggcttgtactcgtattggggctattcattctgttatttttggtggtttctcaccagaagcagtggcagggcgcattattgactctaaagcaaaattagtgatcactgcagatgaaggcttacgtgctggtagagcaatccccttaaagaaaaatgttgatgatgccctcactcatgtggatatcccgcctattgaacatgttgtggtcttacgtcgaacagggcaaacagaacaatggattgaaggacgcgatttatggtgggatgaaattgttcaaggcgtcagtacagaatgtgatgtggaagtcatgaacgcagaagatccactctttattctctacacatcaggctctacggggaaacccaaaggcgtattgcacaccactggcggttatcttgtttatgcctcaatgacctttaaatacacctttgactatcatgatggtgagatttattggtgtacagcggatgtcggttgggtaactggccatagctacttgttatatggcccgctatcaaatggtgccacaacagtgatgtttgagggcgtccccaattacccctccgtcaatcgtatggcccagattgttgataaacaccaagttaatattctctataccgcacctactgcgatccgcgcattaatggcggaaggagacaaagccattgaaggtacacaacgaacctctttacgcattttaggctcagtaggagagcctattaacccagaagcttgggaatggttttatcaaaaaatgggacgtagccaatgccctattgttgatacatggtggcaaacagaaacaggaggcttcatgataaccccattgccaggagcaatggatctaaaaccaggctcagcgactcgtccattctttggtgtacaacctgcgattgttgacaatatgggggaaatacaagacggtgcttgtgaaggtaatttggtgatcgtagattcatggccgggccaagcaagaacattatttggcgatcatgaccgttttgaacagacttacttttcaacctttaaaggcatgtacttttcaggtgatggtgcccgccgtgatgaggacggtgattattggataacaggccgtgttgatgatgttttaaatatctctggtcaccgtttaggtactgctgaaattgaatcagcacttgtcgcccatcctaaaattgcagaagcggctgttgttggtattccccataatataaaaggacaagctatttatgcttatgtcacgctaaatcatggtgaagagcctacggcagagctttatacagaagtgcgcaattgggtacgtaaagagataggcccaatagcaacacctgatatccttcattggacagatgccttacctaaaacacgctctgggaaaattatgcgtcgtatcttgcgtaaaattgcctctggcgacacaactaaccttggagatacctcaacactcgccgatccaggcgttgtagaaaaactgttagaagaaaaacagtctctatcactgaccatttaaagtgctagtgctcaaataatacagcagtcaataaaaccagaatactactatgcaaaggcattttatgcctttgcagggctctcttaccacaaattcatgacatgcggggataaacacctctaaatcatgtaataaaccaaataattattttgaggagaactctgatgaatcccaatatttatcaagagatagaaaataaccctcgctttaaagaactggttaaaaaacgtagtcgtttctcatggggactttcgattattacacttgttatgtatgtctcatttatattgctgattgctttttatccacaatggttaggtacaccgctctatgaaggcagttacattacacgaggtattcctatcggtattggcttaattatcgcctcttttctactaacagggatttacgttattagagcaaatacagagtttgacaaattaacggcagaaattcttggtgaggtagaaaaatgaaaaataaacactacgccatatcactattaacgttattatcccccaatgtattagccgcagcgataaccgaagggggtgaaaaacagccaattaacttccaagccattatcatgtttctgatctttgttggcttaacactgtatattacttactgggcctctaaacgaacacgatcacggtctgattattacactgcgggtggcaaaattaccggatttcaaaatggtatggctatcgctggtgattttatgtctgccgcctcctttttaggaatttcagcgttagtatacacttctggctatgatggacttatctactctattggctttttaatcggctggccaatcattctatttattatcgctgaacgtttgcgtaatttaggacgctatacttttgctgatgttgtctcttaccgtttaagtccaaagcccattagaacactttctgcaataggttcattagttgttgttgccctctatcttattgctcaaatggtaggggcaggtaaattaatcgagctactttttggcttaaactaccatattgcggtgatcttagtcggtattttaatggttctttatgtcctttttggcggcatgttagccaccacttgggtacaaataatcaaagccattttattactcgccggtgcaacttttatggcggtcatggtaatgaaagcggcagactttaacttcaatactttgtttaaagaagctgttaacgtccatcaaaaaggcttttctatcatgagtccaggaggattagtttctgatcctatctctgcattatccttaggtcttgccttaatgtttggtaccgcaggacttccccacattatcatgcgcttttttaccgttagcgatgcaaaagaggctcgtaaaagtgttttctatgcgacaggttttatcggttatttctatattcttacttttattattggtttcggggctatcttactcgttagccctaatcctctgttcaaagatgccgctggtgctttaattggtggcaccaatatggccgctgttcatttagcggatgctgttggtggtaatttcttccttggttttatttctgcagtcgcttttgccactattttagccgttgttgcaggattaactttagcaggtgcatctgccgtttctcatgatttatacgccaatgtaattaaaaatggccaagcagatgagcgacaagagctaaaagtttcgaaaataacggttgttattctcggcattgtcgccattggtttaggtattttatttgagaaacagaatattgcctttatggtcggtttagctttctctatcgctgcaagttgtaatttccctattatcttactctctatgtattggaagggattaacaacacgtggggctgtaattggtggctggtctggcttaattgttgccgttaccttaatgatcttaggtcccacgatctgggtgagtattcttggtcatgatacacctatttatccttacgagtaccctgctcttttctctatgatcattgcctttatcgtttcatggttattctccattaccgataattcttctctggcaactcaagagcgtatgaaatttgaagctcagtttattcgctcacaaataggtattggtgcagagcaaggtaaacctcattaaacatctgtaaaatagttttttattcttaaagtgccaacaatgttggcacttttttttactctttacttaattaaattaatatcggtttaaaaatacatatctatacgatattttaaattactattgactaatgtggtttaattttaagtctattggaaaatttcaagcaagatcaattaattaaaattattataacaataattaaaagtgtaaatataactataagtaacagtataataagtcaataaaagataagataagtactgaaatatcaatttcagactcgttttagctaaacaagacttgtattatgaaatgctaaatggttaactttttattctatatggaaaaaggtgataatgataaaagcatgtctcaagtaataaacttttctcttttatttattttatctatagtacctgcactattagcgggttcaaccctgcatattgaacaaaagttctctatggtgattatcggttggctcctgatgttgctctgcgcaggtatctatcggtttactataggaaaagtgattacttttattgttgcagctttatggtctttaaacctctccatctcactgtttttttatcgtgaacatgatattcccttttcatcatcaatagcagaaactttcattaatactaatggaagtgaaactgttggtatgctctcttataataaatattatgtactcttttatattgttatatttaccagttttttctatttaatacatattagcgcccgttatttaaataacaaaactaataaaagatgtttaattgctatttttatattaataattcttatttctctatacaaaaacttagcaataagatcagagagtaaaacccaattacttgctgagtattatctacttaatacccctttttacaatgcagcagctttagtgcggactttccacgaaaatagacaaatcaaaaagatcacatcagaaaaagttaattttaactatgataaagtggatcaaaaaacagaaatttatattcttttgattggtgaatcagtacgacgtgatcatttaggaatttatgggtatccgtacgatactacccctaatttagagaaagaaaaaaataatattttattatttaagcaagcttattctcctgcgcctgtgaccatattatcagtacccatatccctttctaatatcaacctaacagagttatatgataagaaacactacgctgataatatcatttctcttgccaatcatgctggcttcaaaacatattggttaagtaaccaaggtaaaggaaatccaaaaacgagtgtgatttctgttattgccaatatggcccaacataaaaaatggaatgaatttattggctatgatgaagaattattgccatttttagataatgcgcttaatgataactcatcaaataaaaagctcattgtcctacatacttatggtagtcatgagccagcatgtaatcgttttcctagcacttaccttaaaaccttttcccaacaagaagatgataactgctacgatagctctatcgcttatactgacaaacttatcagccaaattattgaaaaaatacaagataaacccgcatctatactctatttttcagatcacgcattacaacgattagataaaaatagagaagtacgttatcaccatggcgtgaacagtcctcgccaagaagcttataatataccgctctttatttggtatagcgcatctgcaacgcgaccaaatatcaatgaagaaaatttgaataaacctttttctaccgcagataattattggctattaagccaatggctaggtattgaacataactcagcgaaaaaatgttactcacctttaagcgaatgctatcaaacaaaaacgtcaatgatggtcatcgatggtaataagaagttattaaactacgcactattagaatcagaagagcaagcgcctcattgacatcctccacgccctaaaggacgtggagccctactgcgttcagactgatgtctgaatcacctcggcgggttcctgcttcgacgggcggcctgactgcaccctccctccacaggcaagcacggcatgtcctgccgctaaaatgttacgtgccgcattgatatcagcattcgctgtatatccacattcaaggcactcgaattgactttgtgactggcggttttcctttgctgtatgtccacagcaagcgcacttctgactggtgtaggcaggggggtattgccagtacctgaccacctcgccatagctgcttgtactcaagctgacggcgcatttcataccagccctgctccagtattgagcggtttaaaccagaacgactgttgcggtagcgcatccatcccaactttggcaatgatatacgactattggattgatcgagcttcacgccctgcgggtagcgaaaagcgtcatttttaccgcgtttcttgaatcgaggaaaagcggtacgcttctggaaaaaattcttgtaagcccgttccaaatctttaagtgattgttgtaacggttgtgatggggcttccttcaaccattgtgtctctgtgtcagatttccactcaatgagccatgaagccatttttgtatagggaatgtatttattccctgcttcgtgctcctcattctgacgtgctaatgcccgattgaaaacaaaacgacaagcccctgcaaagcgtctcatctcacgctcttgctgaccattgggtcttaactggaatttaaaagcttgtagacgtttcatattatctattatttcatggtccatgaaaaatgaaactaatattcgccgtggcagacattgtgtattcctgatgcacgtccatttggtctttgtcacaaaatacaggcgaaaaatatttgatcaggaagcaattgaaaaatggcgaggctactttgccagtgtttgtgctgattttgatgttgaactggttgaaatggatggggaacgggatcacgttcatttactgattaattacccgccaaaactggcgatatctaatctggttaacagccttaaaggggtatcgagtcgattacttcgacgtgatcgccctgatattgcccaacgtgattactacaagggggttctttggtcgccgagttatttcgcggggagttgtggtggcgcaccaatatccattatccaccagtacattgagcaacaggaaacacctagttagttaaaaaaccgcgccttatatcccctatccccgacctgaaggacggggttttacggtgctttggataaagaggcgcgtgacttaatttaacaatcttcaataatcacataaatcgcatttaaagagccatgaacaccaacaactttaattaattcaatatctgatgtgcaactaggaccactaataatattaatacaagaaggcattcttatattttttaatgccatttgatgtaatctttctgctaactgagcaactcgaggtaaaatcgtactgcgttttagtacaaaaatcgtggtttcagggatcaatccaacacttcttcctttgtcagccccagaaaataaaacaacaccgccagattctgcaagtccatattcagcaaatacaattccgacttttgcctcttttacccgttcaatattttttttaccctcagtatgatcccaaatattggcatgacagtgttctgataaataatcaatcaccccactttcctgtaatcgtggatcacccgttaatatcactggtaaaccatactgttcacaaagagtctctaaatgcttaggtaaagatgacaatgttgtcgtttcataagtacttcctgctaactgagctgtattgagaaaatattgataaagttcatcatcagaaagctccgttaatcgttgttctggatataaatttactggttcaggtaaagcttcaggttgcgtttttaacgacctacctaattgagaagcaagatttgataaaaagcgttctttattgttatccatctcttatttctcctctttttggtgttttttaaaccaactacgaaaactttcaccatcaccttcaggtaaatttctcgcttctgtccatgcttttattgcaccgatatttaatggcgctttaccttctttaataaaccattttgtagcatgagcccccatattcatcccaactttccataacataggatggcggttcacataattaaatacccgagtaatattacgttcagttgtcggtgttataccttgctctaccataacttcacgatgtttctttataagatttgataaaggtatttttactgggcaaacgctatcacaagcagtacataatgagcagacataaggcaggtttttaaagtctttatatccaccaagtagtggcgttaagacggcaccaacagggcctggatagatagaatcatatccttgaccgccaatatggcgataagcagggcaagtattcatacaagcaccacaacggatacaacgtaaaatatctttaaattcagaaccaatgatcttcgagcggccattgtctacaataacaagatggaaatcttctgggccatcaacgttgtcattctctttagggccagtaagccatgtattatagcccgttaaacgtaaccctactgcactacgggccaacatggtaattaagatatctacctctttaaaagtaggtgcaatacgttccatccccatcaccgcaatatgcgttttgggtaatgttgtacttaatcgtgcattaccttcattagtgactaaacaaacagaacctgtttctgctaccgcaaaattacaccccgtaataccgatatcggcagtaaaaaaatcgtctctaatgttctggcgaacaaaacgcgtcatttcttctggtgtatctgagccgttataacccagtttgtcatgaaatatttgacgtatctgagctctatttttatgaatagcagggaccactacatgagatggggcatcttttgcttgttgaagaataaactcggctaaatcggtttcaataacattaatacctgcattttctaatacagggtttaagccaatttcttccgtcaccattgatttggctttgactatttttttggcttttttctcttttgcaatattgagaatatattgagaggcttcttctttcgtttgagcaaagaaaacatgcccaccatgttgttctattttttcagataattgatataaataggcatctaaattagcaagtacatgatcacgaatttgtgccgctctatcccgccaatcctcccagtgtcctaattcatcaaccattttttgacgattacggccaatagtttcttgcgcattagcaacggctttttgcataatttgatcgtgaacttgacgatcaattagcgttttaaaaggaagagagcttgtttttaatgacataattcctcctcattgctcatcaatacttgcgcaatatgcatcactttaactggacgaccttctctctctaaacgaccacctatatttaataagcaactgacatccgcaccaattaaatagtcaggatgagcatccataatgtggtgaactttttctttgaccatttcacctgaaatttcagccatttttaccgaaaacgtccccccaaaaccacaacaggtttccatattgtcaaaaggtaataattctagcccttttacatgacgtaataatgtgagtggctcttctttcactcccattttacgaaataagctacaagacgggtgataaacagcttttcctttaagacttgcacctacatcaacaatatttaattgattaacgataaaggaggtgagatcaaacatgcgattagctattttttctgcacgaatagcccagtcaggttcatttaccagatatttagcataacttttaatagcaaaagaacatgatccagcaggagaaataataggatagtcattaacttcaaaggttttaatcaagtttttcatcgctggaatggcatctttaatatatccactattaatagcaggttgaccacaacagccctgtttttcgagaaaatgaactcgacagcctagtttttctaacagcaatacgctatctcttgccatctgagactttaaagcgtcaccaatgcatgttacataaaaattaacatccatacttatgctcccattgcttttatctatgtagagtaagtaaataagccgagactcatttataaactcatttgtatgacaaatagtgttgcataaaaataatgttaaatatatgtgtataagtgttttttttataaatttacagttttcaagaaataaagaaatgggaatataaagggtatttatgattattttttaataaaaacaatttattactgtggcaaattgagggcgtttattaagtctagttttattacgataaataaagaatttaacgtaagcgaaatagaataaacgcaaaaaagccaacccattgggttggctttctcgtcttatttaatgcttggcagttccctactctcacatggggagaccccacactaccatcggcgctacggcgtttcacttctgagttcggcatgggatcaggtgggaccaccgcgctatggccgccaagcagaattcttcaaattctgtaattattcgtctcatcctgagactcaccccttcggggccagtgctccgcactgttccagtttgttccagacaaactggtcggttttaatcactcgcttctttcctttcggtaagtcgccagtaattcaatcttaaacaagctgacttcatcgtttcgtctctctgacaaaacactttcggtgttgtcaggttaagcctcacggttcattagtactggttagctcaacgtatcgctacgcttacacacccagcctatcaacgtcttagtcttaaacgttcctttaggtcgcttaaagcgacagggaagactcatctcgaggcaagtttcccgcttagatgctttcagcggttatctcttccgcacttagctaccgggcaatgccattggcatgacaacccgaacaccagtggtgcgttcactccggtcctctcgtactaggagcaacccctctcaatcttccaacgcccacggcagatagggaccgaactgtctcacgacgttctaaacccagctcgcgtaccactttaaatggcgaacagccatacccttgggacctacttcagccccaggatgtgatgagccgacatcgaggtgccaaacaccgccgtcgatatgaactcttgggcggtatcagcctgttatccccggagtaccttttatccgttgagcgatggcccttccattcagaaccaccggatcactaagacctactttcgtacctgctcgagccgtcactctcgcagtcaagctggcttatgcctttgcactaaccgcatgatgtccgaccatgcttagccaaccttcgtgctcctccgttactctttaggaggagaccgccccagtcaaactacccaccagacacggtccccgacccagtttatgggcctaggttagaacatcaaacgttaaagggtggtatttcaaggttggctccatgcagactggcgtccacacttcaaagcctcccacctatcctacacatcaaggctcaatgttcagtgtcaagctatagtaaaggttcacggggtctttccgtcttgccgcgggtacactgcatcttcacagcgagttcaatttcactgagtctcgggtggagacagcctggccatcattacgccattcgtgcaggtcggaacttacccgacaaggaatttcgctaccttaggaccgttatagttacggccgccgtttactggggcttcgatcaggagcttcgccttacggctgaccccatcaattaaccttccagcaccgggcaggcgtcacaccgtatacgtccactttcgtgtttgcacagtgctgtgtttttaataaacagttgcagccagctggtatcttcgactggcttcagcgccgtccgcaagggactttacctaccgccagcgtgccttctcccgaagttacggcaccattttgcctagttccttcacccgagttctctcaagcgcctgagtattctctacctgaccacctgtgtcggtttggggtacgattgttggtaacctgaagcttagaggcttttcctggaagcggggcatcaattgcttcaccaccttggtggttcgtcatcacatctcagcattaagtgaccggatttgcctaatcactctgcctacctgcttgaaccgggacgaccgtcgcccggacaacctagccttctccgttcccccatcgcagttaccaccagtacgggaatattaacccgtttcccatcgactacgcttttcagcctcgccttaggggtcgactcaccctgccccgattaacgttggacaggaacccttggtcttccggcgtgcgggtttttcacccgcattatcgttacttatgtcagcattcgcacttctgatacctccagcatacctcacagtacaccttcgcaggcttacagaacgctcccctacccaacaacactacgtgtcgctgccgcagcttcggtgcatggtttagccccgttacatcttccgcgcgggccgactcgaccagtgagctattacgctttctttaaatgatggctgcttctaagccaacatcctggctgtctgagccttcccacttcgtttcccacttaaccatgactttgggaccttagctggcggtctgggttgtttccctcttcacgacggacgttagcacccgccgtgtgtctcccgtgataacattcttcggtattcgcagtttgcatcgagttggtaagtcgggatgaccccctagtcgaaacagtgctctacccccgaagatgagttcacgaggcgctacctaaatagctttcggggagaaccagctatctcccggtttgattggcctttcacccccatccacaagtcatccgctaatttttcaacattagtcggttcggtcctccagttagtgttacccaaccttcaacctgcccatggatagatcaccgggtttcgggtctataccctgcaactcattcgcccagttaagactcggtttccctacggctcccctatgtggttaaccttgctacagaatataagtcgctgacccattatacaaaaggtacgcagtcaccccataaagaggctcctactgcttgtacgtacacggtttcaggttctttttcactcccctcgccggggttcttttcgcctttccctcacggtactggttcactatcggtcaatcaggagtatttagccttggaggatggtccccccatattcagacaggataacacgtgtcccgccctactcatcgagttcacaataacagcatcttcagatacggggctatcaccctttactgccggactttccagaccgttctcctgacactgctattgattaagactctgggctgctccccgttcgctcgccgctactaggggaatctcggttgatttcttttcctcggggtactgagatgtttcagttctcccggttcgcctcattaacctatggattcagttaatgatagtatccattggatactgggtttccccattcggatatcgtcgggtataacggttcatatcaccttaccgacgcttttcgcagattagcacgtccttcatcgcctctgattgcctaggcatccaccgtgtacgcttattcgcttaacctcacaacccgaaagtgtctctttcaaagactatctgggtggtgatggctgcgcagattacatttcttcgttgggcagtgctcgcaatgctcacatacttaagtatgctgcgcttgctgtgcgctgtccgcctcgaactgtaaattgctcgctcatcccactttgatgtcaaaacacattcaaagtttgagattttgagagactcatcaatatacctcgttgttgatatattgatttgttttcaatttttcagcttgttccagattgttaaagagcataataagtaagataactcatttgaattagcttagttattctctgactttcgtcagataagtggtacgcctttcactcataccgcgcattggcgtcccctaggggattcgaacccctgttaccgccgtgaaagggcggtgtcctaggcctctagacgaaggggacttctgtcagcttcgcagacgcgcttttgctcgttcttcatcagacaatctgtgtgagcactgcacataacacgtatctcttaggtaaggaggtgatccaaccgcaggttcccctacggttaccttgttacgacttcaccccagtcatgaatcacaaagtggtaagcgccctcccgaaggttaagctacctacttcttttgcaacccactcccatggtgtgacgggcggtgtgtacaaggcccgggaacgtattcaccgtagcattctgatctacgattactagcgattccgacttcatggagtcgagttgcagactccaatccggactacgacagactttatgagttccgcttgctctcgcgaggtcgcttctctttgtatctgccattgtagcacgtgtgtagccctactcgtaagggccatgatgacttgacgtcatccccaccttcctccggtttatcaccggcagtctcctttgagttcccaccattacgtgctggcaacaaaggataagggttgcgctcgttgcgggacttaacccaacatttcacaacacgagctgacgacagccatgcagcacctgtctcagcgttcccgaaggcactcctctatctctaaaggattcgctggatgtcaagagtaggtaaggttcttcgcgttgcatcgaattaaaccacatgctccaccgcttgtgcgggcccccgtcaattcatttgagttttaaccttgcggccgtactccccaggcggtcgatttaacgcgttagctccagaagccacggttcaagaccacaacctctaaatcgacatcgtttacagcgtggactaccagggtatctaatcctgtttgctccccacgctttcgcacctgagcgtcagtctttgtccagggggccgccttcgccaccggtattcctccacatctctacgcatttcaccgctacacatggaattctacccccctctacaagactctagccaaccagtttcagatgcaattcccaagttaagctcggggctttcacatctgacttaattgaccgcctgcgtgcgctttacgcccagtaattccgattaacgcttgcaccctccgtattaccgcggctgctggcacggagttagccggtgcttcttctgcgggtaacgtcaattgataagggtattaaccttatcaccttcctccccgctgaaagtactttacaaccctaaggccttcttcatacacgcggcatggctgcatcaggcttgcgcccattgtgcaatattccccactgctgcctcccgtaggagtctgggccgtgtctcagtcccagtgtggctgatcatcctctcagaccagctagagatcgtcgcctaggtgagcctttaccccacctactagctaatcccatatgggttcatccgatagtgcaaggtccgaagagcccctgctttggtccgtagacattatgcggtattagccaccgtttccagtagttatccccctctatcgggcagatccccatacattactcacccgtccgccgctcgtcagcaagaaagcaagctttctcctgttaccgctcgacttgcatgtgttaggcctgccgccagcgttcaatctgagccatgatcaaactcttcaattaaaagtgtttgatgctcaaagaaatcgaaaacttagcttattcattatatgaattaacttgttagtcactcttcaagacttgatacatctaattttttagaagatatcgtctctgcgagtgcccacacagattgtctgataatttgttaaagagcagtgcaactatcgctgccgtttccggtcttctgcgttgttgcgaggaggcgtatattacgctattcctctgaagagtcaagagttttttcaaacttttttcttttctcttccctttccgtcgttgctgttgtcagctcatcgtcggtcagtgggtgcgcattataggggcttctcagattagcgcaagtatttatttcaattttttttctgttcgctctatttttcaacaaaacgaatgaaaatgctctaattttacactgatagattaaaatccaaacagctttattgctattactcacgtaatatagaaagcaaattatggtaaaggtaactattattatgcaactaagcgaacaacgctcagcatcccaaaaaaatctttcttatattgttgctgaaaagctaggtaaacaaatactttctggatactacgaacctgaatctttattacctggtgagatagaactcgctgaactactttcagtcagtcgaactgttattcgtgaagcaataaaaatgcttgctggaaaaggtatgttactacctcggccaagaataggtactcgagttacgccaatgcaaaattggaatctattagataatgatttacttaattggtggatagatagcggtgaatttaataaggtgagtcattatttccatcatgttcgtttagcaatagaacctcaagcctgttatttagctgcattacatgcttcagagacacaaaaagagtcgctattatttctagctacagaaatgcagctactcaaagataactttaaccgtcagcattggttagatattgatacacaatttcactatctaatctatcaagccagtggcaatccattttttgcttcttttggttctctttttctatctgcctacaaaaaatattttgatttaattgttggcaatgaaacagtacagcctgaaactcataatcaaattgtacaagcgattatagaaggagatggaaatagagcgcgtgatctttgtttaatactattaataaatgactgagtatttttaatacgattttattgtctttttgtttatactggctaataagctaaatataaaagaaagacggtatctgttacatgttaaaatccgccaaaaatatgtcagggttgccctggatcgctgcaatggctttttttatgcagtcattagatgcgactatattaaatacggcactccctgatatagctaaaagtcttaaccactcccctctcgccatgcaatcagccgtaattagctatactttaacggtagctttattaattcctgtaagtggatggttagctgatagatttgggactcgcaagattttcattatcgccgtttcactcttttctggcggttcattattatgcgcactttctcctaaccttgcttttttggtaatttcgcgggttatacaaggaataggtggtgcaatgatgatgccggttgctcgtcttgctttattaagagcttatcctcgtagcgaactccttcccattcttaactttgtcaccatgccggggcttgtggggccaattgcgggtccattattgggagggatccttgtcacctatgcttcttggcattggatatttattattaatattcctattggcttacttggtattttttacgccataaaacatatgcctaattttacgatgccaaaacgtaaatttgacttactcggttttattttctttggttttggtttagtcatgttatccgtcagcctcgatctttttggcgataaaaacatctctcgatatatccctcttgcggtgattttaggtggcttctttttactcggtctctatatcaatcacgctaaacgccaccagcaacccttaataccattaaatatattcaaaacacggactttctctgtcggtattgcgggtaatatcgcaacgcgcttaggaacaggatgcattcctttcttaatgccactgatgttacaagtaggttttggctatcctgctattatctcaggtatgatgatggcaccaatggctttgggctctatactcgccaaatcctttgtgacaaaagtcttagtgacatttagctatcgccggacactatttggaataaccattattataggtctgatgattgcacagttttccttacaatcacctgatatgtctatttattacctagtattaccactctttttattaggtgttgtcatgtcaattcagtttacttcgatgaatactatttcactcgctgacttaactgacaataatgccagttcaggcaatagtgttttagccgtcactcaacaactagcgattagttttggtattgcagtaagtgcttctatcttaaattattttgatgcagaaaatgccggctctacggtagataacttccattatacttttattactgtcggcgctattacactactctcttcatttgtcttcttattacttaataagcatgatggtgataatcttactaataagaagaaaaatgaaaactaattagttgagatataaaaataaaagagagcctatagctctcttttatacgccactctaaatagcgataatcttatttttacgctagtcatgctgcgacaaaaaagcttcaatttcatggcgccaaggtactgacggttgtgctcctgcacgagtaacagcgatagcggcggctgcatgcgcaaatttaatcgccttcatcattggtaaaccttctaataaagccgttataaaagcgccattaaatgtatctcctgcagcaatagtatctattgcggtcactttaaatgccggaaccatcgttccttgattgttttgactaacccaaacaccacggctacccaaagtaattaaaacggtttctatccctttatcatgtaatatattagatgcacgttgagcactttcatcatcaataacttttacccccgtgaggtattcagtttctgtttcattaggtgtaatgatatcaacgagagataataattcatccggcaaagcctgtgctggtgctgggtttaatatgacttgcacactttcttgtttagcgacttgagccgcttttaatacagaatctagaggtgattctaattgcataagtaaagcatctgcttttttaatcaccgagttataacgttcaacatattctctgtttaaccttccattggctccagcgtgtataccaataacgttttcaccttgctgattaacaaaaatcaacgcaacacccgtggcttcatcatcaattaattcaatacaatctgtatctattttatctgtgatcagctgagctttagcactttgaccaatatcgtcatttccaagacaagctaaaaaggtaatattagcaccacaacgccctgcagcgacggcttgatttgcacctttacctccaaaaaccatctgatactgattaccggaaatagtttcaccaggatgcggaaaatgagcaacattaagaatatgatcgacattaacactacctaaaatcactaatttcttcgcttccatgatatttccttactatcaagtgataatgttttaatgccattaattgatgacatgtcgtattttaaatcgatcatctcagcaacattaatgaaaaaacgtgatcaccatcgaaacgtttcgccagcaaaacaaaaaagaaccaaaagaagcagtaggaagctgaatcgatttttgttataaacgaattgtgtactaattgaataattgactatatgtcattactcattttttgatagtttcatctctataacgaaaataagtaccctaattaggagcctttatgcaacttgcagaacggatctcacaacttagccaataccttgaaactgggctttatgaacgtcaatcagcgatacggctttgcttactcgcggctttaagtggagaaagcgtttttttgctaggtcctccaggtattgctaaaagcttaattgcgagaagaatgaaagaggcatttaaacacgctaaagcgtttgaatatttaatgacccgtttttcaacacctgaagaaatttttggtccactatccattcaagcattaaaagatgaaggaaaataccaacgtttaaccgaaggttatttacctgacgccgaaattgtttttcttgatgaaatatggaaagccggtcccgctattttgaataccttattaacggcaattaatgaacgtaaatttcgcaatggcgaaaacgaagtaagtattcccatgcgtttgttagtttcggcttctaatgaactacctgattcagacagcagtcttgaagcgctttatgatcgaatgctgattagaatttggttatcaaaagtacaagataaaaaaaacttccgggcgttattagttaataaagaggtcagcgcttttcgtattcctgaacaactacaaattacaacagacgaatttttactttggcaaacagagttagaaaaaattactttgaatgaccacttattcgaattaatttatcaacttcgcaactcactcgataaaagtgatgcagcaccttatgtttcagacagacgttggaaaaaagcggttcgtctattacaggccagtgctttttttaatggtcgtagtgcgatatcacctttagatcttattctgttaaaagattgcctttggcatgatcaagcttcttttgcgctgctaaatgacttattaaaaacactattaacagaacaagcataccaccagctaacacttttacagaaaatagaaaatctgtgggctgaatggatgcaatcgacaagaagcaaacaagatcaacaagcatttcgctttgaaaaacaaagtagtatgtttggtagaaatatacatttcaaattatcagaaaaaatgcagtctgataaatttacgctgtttttacatattccactgcatatacatagtattcaagttaactttataactgttgagaaaaaagcattagaaactttcttagataaaggtgatgaactctctgccagattaaatggtattggtttcccacaatctattaatgcacaaattcgtcaagatggtgtcttagaggtattggatgttagtcgccgaacaacgtcgttataccaacagtcagaaagcatcaaaacagagcctattgaagataatcaacaatggttagataaattaaaagatctcacccaagagatttattctgaacaagaaaattttaatcatcatcaacctaatatctttattgataatgattggctcatttctatagaacaaagctttttgcaattaaatgaaaaattatctcaattaagaagtcaaataaagtgaccatgccatgctaacactttctaccatcgatatgcttttagcgataaacgaagggcagcttatagaagaagtgattatcactttattagcttctcctcaattagctgttttttttgaaaaacacccaagattaaaaaaagcattactaaaagacatttatcaatggaaaaaaagcttacaagaaaaagtgaaagaaacactggtgccgaccatcatcgcagatgaatttgcactttatcagcaaacgcaatcattatgtaatgctgtttttaatcagcaagtggacaatattcttacagaactaaatcagcttgattcttcatttgttatagaagcaacacaactaataaaaacaaataaacctttttctccagctcaacaagctctatttattcaacgctggcgcattagtttaatatttcaagtcacgacattacataaagcactgtttgaacaagagcaagagcagttacttgcagaactacaagaacgcttagcattaagtggcagtttaagtaatacattttctgaaaatgaacgggctgcaggccgtttatgggatatgagcaaaggcgttattaccaaaaccccctatgatgagaaaattattcaacgttatagtgattttctaaatcaacaacctgaattacataaattggccagcttactggggcgaagtaaaacggcgaaatcgcttcctgaagagagtgtgatttttgaatcaataacaatcgttgaaaaagcaccggataccacgccagagcaagtaaatggtataggcttaagtgatgatattttacgtttattacctgctgaactagctttattaggcataaatgaagttgagtatgagttttatcgtaaactcattgaaaaacagctcaatacttatcgtttacagggtgatagttggcaggaacgcacagtattacgcccagtcactcatcaccttgatgaagaacggccaagaggcccttttatcatttgtatcgacacttctggctctatggggggatttaatgagcaatgtgctaaagcctttggtttagcactaatgaaaatagcactagcggataaccgtgcctgtcatgtcatgctgttttcaacagaaatgatccattaccaattatcttcttctgatggattacaagaacttgttaaatttttgaatcaaacatttagaggtggaactgatttagcatcttgtttaaatgaggtagcagataagcttaatacccccacatggaaagacgctgatgctgttgttatttctgactttgttgcccaaaggttacccgaaaacctaatcaataaaatcaaaaaagtccaacagcaacagcataatcgcttccatgcggttaccctatccaattatggtaaacccagtattatgaaaattttcgaccacatatggcgttttgatactgggttaaaaagtcgattactacgacgttggcgtcaataattacagcatatccgcaaaagctaaacgggtgtcttgttgccaaacgccacattgtacttgtccaatatgctctttttgcaaaagtagcatgactaaacgtgattgacctataccgccaccaattgtttgtggcatatcgccatgcattaatgctttgtgccaatctaactcaagacgttgagtatcatcagttaaagttagctgacgcattaatgtctctggatcaacgcggatacccattgacgacacttcaaaagcatcttgcaatactgggttccaaactaaaatatcgccgttcaaccctgcaaagccatcttcgttaggtgttgtccagtcatcataatctggcgctcttacatcatgagcttcgccacttgatagttttccaccaataccgattaagaaaacagcaccatattctttagctatcgctttttcacgacctttagcatcaagatcagggtagcgacgtaacagttcttcagtgtgaataaattgaatttgatctggcaggaacggtgtcagaccaaattcatcgctgacggctttttcagtttcttttatagcctgatagattttacccactgtctgcttaaggtaaggtagtgtacgctcctcaccttccatcactttttcccaatcccactgatcaacatagacagaatggattggcgttaagcgatcttcatctggtctcaaggctttcatatgtgtataaagaccttgaccagaactaaatccaaaacgacctaatgttttacgtttccattttgctaatgaatggacaacttcaaaggtagaatcaggtaaagatttcactttaacctgtacggccttctcatgaccagataagttatcttgagttccatcaccaaggcgacttaagatcggtccttgaacttcaatcaggcctaattctttttctaataaacgtgaaaaatatgatttaacaaagctaatttgttgttgagtctgaatgaatgatttttccattttttatatccctagtggcgatgttgtgttttgctgagatagattaagcaacaaaagtgggggtaaattcaatatacttcattaaaaatagccttgcctatttaaaatcgttaaaaaaaacactataaaaatgcattatcattaaaaacagggggattttatggacaatatttatcagatcgataatctcgatcgtgacatacttcacgctttaatggcgaatgctcgaacaccttatgctgaattagctaaaaaatttgcagtaagtccgggcacaattcatgttcgtgttgaaaaaatgaagcaagcaggaattattacggggacacgcgtagatataagtgaaaaacaactagggtttgatgtttgctgctttattggcatcattttaaaaagtgccaaagactaccataccgcattagataagctagataagttagatgaagtggttgaggtttattatacaacaggtcaatacagtatctttattaaggtaatgtgtaaaagcatcgaagcgcttcaagacgtacttatcaacaaaattcagactattgatgaaatccaatcgacagaaaccttgatctctttgcaaaacccgataacaaggacaatcaagccataacgaaaaaaaactatttttttttataaccacattatccacaggtagatcccaagtgattcacagcgtacaatagcgcgtcttgaacataaggagatcatgaatgaaaaaagtcacgctaattagtggcagcaccatgggtagtgctgaatatgtcgccgaacacctcgaagagatcttatctaaagagggatttgagacagatctacaccatgggccttctcttaatgatcttccgcaagaagggatctggttggtgatcacttccacacacggtgcaggtgagatcccagataacctccagccatttgctgacgaaatctcagcagacggcattgatctaagtaaagtttctttcggtgctgtaggtataggaagtagtgaatatgacactttctgtggtgcgatcagaacattagatcaaaaactaatagaaaaaggggctgttcgattaggtgatcgcctagaaatagatatacaagaacacgacattccggaagatccagcagaggaatggcttacaacttggaaaaatttactttaaatcgaacaaaaaaacagcaatcagatgtggataactatgcttaaaagcaggggttaacccgtagttatccattgtataagcctatatccagaaatgacctgtgtataactcgctgttttgatcccagcttatcagcatctagatcacggatcattcacagtatatgatcctttacacttttatgatctttaaatagaaaatccacttatccacagaggatcgcttccttaataaaagatctaataaagagatctttaaataaaaagatctttaaataattacctgcggatcatgctcacttgtatctgtcaaaaagttgagtagaattcgttttcccaatgcaacacattcagcatttcgtaacatttaaggttcacacatgttttatccagaacattttgacgtcattgtcatcggtggtggtcacgccggtacagaagccgctatggctgcagctcgtatggggcgtcaaaccctattactgacccacaatattgatactttgggccaaatgtcttgtaacccagctattggtgggattggtaaagggcatctggtaaaagagatcgatgccatgggtggattaatggccacagccatcgaccatgctggtattcaatttagaacccttaatgcaagtaaagggccagcagtaagagcaacaagagcacaagccgatcgcgtactttatcgccaagctattcgcacaacccttgaaaatcagcctaatttaatgatcttccaacaacccgttgaagatctcattgttgaaaatgaccaagtaacgggtgcagtcactcgtatgggattaaaattccgtgctaaagcggtagttttaaccgtaggaactttccttgatggaaaaatccacattggtttagaaaattacagtggtggccgagcaggtgatccaccatcagtctctttatcacatcgattaagagaattacctttacgtgtaggtcgcttaaaaacaggtacaccacctcgtattgatgcaagaactatcgattttagtcaattagcgccacagttaggcgataatccaatgcctgttttctcatttttaggtaatgtggatcaacatcctgaacagatgccttgccatattactcatactaatgagcaaacacatgaaataattcgtaataaccttgagcgcagtcctatgtatgcaggggttattgaaggtatcggccctcgttattgtccatcaattgaagataaagtgatgcgatttgctgatcgcaattcacaccaaatctttttagagcctgaaggcttaacaagcaatgaaatttaccctaatggtatttcaacaagcttaccttttgatgttcaaatgcaaatagtaaattccatgaaaggtatggaaaatgccaagatcatccgacctggttatgcgatagagtatgacttttttgatccccgtgatcttaaacaaacactcgaaagtaagtttatcaacggattattctttgctggccaaattaatggcactaccggttatgaagaagcagcagcgcaaggtctattagcaggtcttaatgcggcacgttatgcttttgatcaagaaggttggttccctcgtcgtgatcaagcctacattggtgtattagttgatgatctttgtaccttaggtacgaaagagccataccgaatgtttacttcacgtgctgaatatcgcttgatgttacgtgaagacaatgctgatttacgtttaactgaaattggtcgtgaacttggtatggttgatgacaaccgttgggcgcaatttagtgaaaaagtcgaattagttgaaaaagagcgtcaacgtttaagagatatttgggttcatccaaaagcggataacctagaagaaatcaatcaattacttaaaacgccactgtctaaagaggcgaatggggaagacttattacgtcgtcctgaaatgacctatgagattttgaaaaagatccctcgttttgctcctggtattgatgattcgagaccacaagcggcagagcaagttgagatccaagtaaaatacgaaggttatatcaatcgtcaacaagaagagattgaaaaacaactgcgtaatgaaagtgctgcattgcctattgatatcgactacaaacaggtgagtggattatcaaatgaagttattgccaaactaaacgatcacaagccaacttcaataggtcaggcatcgcggatctccggtgtgacacctgcagctatctcaattttacttgtttggttaaaaaaacaaggtttattacgccggagtgcatcatgagtgacttacttaatcggttaaaaaagctggcaaagcaagccaatattgagttaactgatgttcaagctcaaaaattaaccgcttatgttgctatgctcgataaatggaataaagcatataatttgacctctgtcagagatcctcaacagatgcttattcgtcatatcttagacagcatagttgtgagtcaataccttaaaggaaacaacttcatagatgttggtaccgggccaggattgcccggtattcctttagcaataatgcgtcccgatcaccactttgtgttacttgatagcttaggtaaacgcgttcgttttatgaaacaagttcagcatgaattagctctgcataatatcgaacctgtgcaatatcgagttgaagagtatcaagtagaaaaaccatttgatggtgtgattagtcgtgcttttgcctcgatgaaagatatgctttcttggtgttcacatttagtcactgaagaacacgggcgtttttatgcattaaaagggcagattcatcaagaagaacttgatgagctttctgaaaatggtttaaagatgcctgaaaaggtgattaatttagcgatccccgaattgaatgaacagcgtcatctggttattttttaaactgtagacggctattcatcggcttcttttttcattttttgtgctttagcgataacatttacaatgttatcgctatttactttaagggataaaatagcgtcattccatatttacccatattttacaattaagtaacaaataattatctttttatttaattgcctgtattcccctcatttttttatttttctttctaaaataaattaataaatttatgcattctcaaaaatatttaatttatttaattgaaaaatcattaattatttttctttttggctgtttttgttcagaaaaaggcagttatttgttaactctattataatttttatgaaataaaatttatttatatactattttgtgtgttctagatcacattattttttctgtttatgctgattatttttgcgctttttgttgctaatcattttccataaatggaaccttcataaaaaatttaaattattcttcactttttcgctacttattgattgaattcattgccacgccccgtataatttgctcgtttttgtcacttgacactttatagcaaagacagtttgatacattattcagtaataccttttacgatagcgagtctggagaatacaaacgtcatgtctgtctccctctacagcgggaaagttgcactgaaactgttatttttgcagtttatgacttttgttattctcagtgcgggtttctactttaagagtacagactggagcttttctgcttttttaggtggaattgcatgttggttacccaatattgcatttttattattactacgcttacaaaaagtagatgaaaatgaagcttcagttcgcataaactggctttttgctttcagtgaagggttgaaggttatattatcaatagccttgctgatagttgctttaggagtgtttaaagcggcatttgcaccactggtcatgacctacttagcggtgcttgttatgcaggtcgttgcaccagccgtcataaacggttagcgtttttaacaacaaaagggtaattggcatcatgtctgcatcaggagaagcattaaccactagagactacataggtggacatctgaataaccttcagttggacctacgtactttcgagttggtcaatccccatgctgaaaatacgccatcattctgggtgttaaatattgactcacttttcttctctgtactcatggggcttttgttcctatggatatttagaaaagtagcagtaaaagcaaccagtggcgtaccgggaaaattccagactgcagtagaaatggtcattggtttcgttgatagcagcgttcgtgatatgtatcacgggaagagcaaagtcattgcacctttggcattgactgtgttcgtttgggtgctgttaatgaatgccctggatttattaccaattgattttatcccatatatcggtgaacacatcttagggttaccagcgttacgcatcgttccgactgctgacgtgagtatcactctttcgatggcaattggtgtatttatcctgattctcttctacagcattaagatgaagggcgtaaaagggtttactaaagagctgacgttacagccttttaatcaccctgtatttattccaatcaacttaattctggaaggggtaagcctgctatcaaaacctgtttcactcggtcttcgactgtttggtaacatgtatgcgggtgaactgatctttattcttattgctggtctgttaccgtggtggtcacagtggttattaagcctaccttgggcgatattccacatactgattattacgttacaagcctttattttcatggttctaacgattgtttatctgtcgatggcatctgaagaacattaattattaactctttaaagaaataactgaaacaaactggagactgtcatggaaaacctgagtatggatctgctgtacatggctgccgctattatgatgggtttagctgcaatcggtgctgcaatcggtatcggaatcctcggaggcaaatttttagaaggtgctgctcgtcagcctgatctgatccctcttctgcgtacacagttctttatcgttatgggtctggttgacgccatcccaatgattgctgtgggtctgggcctttacgtgatgtttgctgtcgcctaatgatggtgatgagcagtaaaaacatcaagttagttaataaccaagaaagaggtattgtgctgtgaatttaaatgcaacaatcctcggccaggccatcgcatttgtcctgtttgttttgttctgcatgaaatatgtatggccaccaattatggcggccattgaaaaacgtcaaaaagaaattgctgacggtttatcttctgcagaacgtgcgaaaaaggacttagatttagcgaaagccgatgcaggcgaacagttagcgaaagcaaaagctgaagcacaagcaatcattgagtctgcgaataaacaacgcactcaaatgattgaagaagctaaagctgaagcagagcaagaacgtagtaagatcgttgcacaagctcaatccgaattggaagcagagcgtaaacgtgctcgtgaagaacttcgtaaacaagtcgctatgctggctatcgctggtgccgagaaaattattgaacgttccgtggatgaagctgctaatagcgacatcgttgataaactggtcgctgaactgtaaggagggaggggcatgtctgaaatagcaacggtagctcgcccctacgccaaagcagcttttgactttgctgtggaaaaccaggctgtcgataaatggcaggttatgctggcattcaccgctgaagttgcacgcaatgagcaggtaaccgaattactttctggttctttagcatcagaaaaactggctgacatctttatcgacctttgtggcgatcaaattgatgaacatgctcagaacttaattcgtgttatggctgagaatgaccgtttatcaacattgccggaagtattgagccaatttattcaattgcgcgcagtactcgagtcaacggttgatgttgaagtcacttctgccattgagctaactaaacagcagctagctaacatttctgcagcgatggaaaaacgtctatcacgcaaagtgaagctgaattgcaaaattgataagtccgttatcgcaggcatgattatacgcgccggtgaccttgtcatcgacggtagtgttcgtggccgtttagagcgattaactgacgtcttgcagtcttaaggggactggagcatatgcaactgaattccactgaaatcagcgaactgatcaagcagcgcattgctcagttcaatgtagtgagtgaagctcacaatgaaggtacgattgtttccgttagtgacggtatcattcgtatccacggtttagccgaagttatgcagggtgaaatgatcgcactgccgggtaaccgtttcgctatcgcattaaacttagagcgcgactctgttggtgcggttgtgatgggtccttatgctgacttagcagaaggcatgaaagttaaatgtacaggtcgtattctggaagttccagttggccgtggtctacttggtcgtgtagttaacacactgggtgaacctattgatggtaaaggtgctgtagagcatgatggcttctcacctgttgagatgattgctccaggtgttatcgaccgtcaatcagtcgaccaacctgtacagacgggttataaatccgttgacgccatgatcccaattggtcgtggtcagcgtgaattgatcatcggtgaccgccaaacaggtaaaactgctctggctgtcgatgcgattattaatcagcgtgactctggcattaaatgtatttatgtcgctatcggtcagaaagcatcgactatttcgaacgttgttcgtaaattagaagagcatggcgcgttagaaaacaccattgttgttgttgcttctgcatcagaatcagcagcgttgcaataccttgctccttatgcggggtgtgcaatgggtgaatacttccgtgaccgtggtgaagatgctctgattatttatgatgacctgtctaaacaggctgtcgcataccgtcaaatttcactgttacttcgtcgtccacctggacgtgaagcttaccctggtgacgttttctatctgcactcccgtttattggagcgcgcagcgcgcgttagcgctgagtatgtagaaaactttactaacggtgaagttaaaggtaaaaccggctcactgactgcgttacctattatcgaaacgcaagcaggggacgtttctgcattcgttcctacgaacgtaatctctattaccgatggtcagatcttcttagaatctaacctgtttaacgcaggtatccgtccagctgttaacccagggatctccgtatctcgtgtaggtggtgcagctcagactaagattatgaagaaactttctggtggtatccgtactgcacttgcgcagtatcgtgagctggcagcattctctcagttcgcttcagatctggatgatgctacccgtaaacaattgaaccacggtcagaaagtgactgaattgctgaaacagaaacagtacgaaccaatgtctgtcgcacaacagtctttatctctgtttgctgcagaacgtggttatctggaagatgttgaaatttcaaaagttgtgccatttgaagcggctttattagcttatgcttctcgtgaacatgctgatttactgaaagaaatcaaccagaccggtacttataacgaagaaatcgaagcgaagctgaaaggcgtgctagacaacttcaaagcgactcagtcctggtaataactattcggcctaataatgatcattaggccgtctggttcatgaggagaagcagaaatggccggcgcaaaagagatacgttcgaagatcgccagtgtgcaaaacacacagaagatcactaaagcgatggagatggtcgccgcgtcgaaaatgcgtaaaacgcaggaacgcatggcagccagccgtccttatgcagaaaccatgcgcagtgtgattggtcaccttgcgttagggaatctggaatataaacatccatacctcgaagagcgtgaagttaaacgtgtcgggtacctggttgtttcgaccgaccgtggtttgtgtggtggtttgaacattaacttgttcaaaaaactgctggcagacatgaaagagtggtctgataaaggtgtagaagtagatttagcccttgttggttctaaagccgtttcattctttgcctctgtaggtgggaatgttgtcggtcaagtaaccggtatgggtgatgatccgcaactatctgaccttatcggcccagtcaatatcatgttgcaggcttatgacgaaggtcgtttagataaactgtatgtggtggcaaataagttcatcaataccatggcccaagagcctaaaattctgcaagttttaccattaccaccaggtgatgatgaagaactgaaagaaaaatcttgggattatctgtacgaacctgatcctaagacgttactggatactttactgcgtcgttatattgaatcgcaggtttatcagagcgtcgtagagaacttagcgagtgagcaggcagcacgaatggtcgcgatgaaagccgctacagataacggtggtaatctgattaaagaactgcaattggtgtacaacaaagcacgccaagcaagcattactcaggaactgacagaaattgtatctggtgcagccgcggtataacagctaggtttacgaattacgtagaggattcaagatggctactggaaagattgtccaggtaatcggcgccgtagtggacgccgagttccctcaggatagcgtccctaaagtatacgacgctcttgaggttatgaatggtaaagaaaaactggtgctggaagttcagcaacagttaggcggtggtatcgttcgttgtatcgcaatgggtacatcagacggtttaagccgtggcttaaaggttgaagatttaggccacccaattgaagtaccagtaggtaaagcgactttaggacgtatcatgaacgttctgggtacacctattgatatgaaaggtgagattgaaaccgaagagcgttggtcaatccaccgtgaagcaccaacttacgaagagttatcaaactctcaagaactgcttgaaaccggtatcaaagttatggacttaatctgtccatttgctaaaggtggtaaagtcggtctgttcggtggtgcgggtgttggtaaaacagttaacatgatggaattgatccgtaatatcgcgatcgagcactcaggttactctgtatttgctggtgttggtgagcgtactcgtgagggtaacgacttctatcatgaaatgacagattctaacgttcttgacaaagtatcgttagtttacggtcagatgaatgagccaccaggaaaccgtctgcgtgttgcactgactggtctgactatggctgaaaaattccgtgatgaaggccgtgacgtactgttattcgtcgataacatctatcgttacaccttagccggtacagaagtatcagcactgttaggtcgtatgccatcagcggtaggttaccaaccaacattggctgaagagatgggtgttctgcaagagcgtatcacttcaaccaaaacaggttctatcacctctgttcaggcggtatacgtacctgcggatgacttaactgacccatccccagcaaccacctttgctcacttagatgcgacagtggtactgagccgtcaaattgcttcgttaggtatctaccctgcggttgacccactggattcaaccagtcgtcagttagacccactggtagttggccaagagcactatgatgttgctcgtggtgttcagtctatcctgcaacgttatcaggaactgaaagacatcatcgctatcttaggtatggatgaactgtcagaagaagataaactggttgttgcgcgtgcgcgtaagatccagcgcttcctatctcagccattcttcgttgctgaagtatttaccggttcaccaggtaagttcgtttccctaaaagacacaatccgtggctttaaaggtattctgaacggtgattatgaccacctgccagagcaggcgttctacatggttggtactatcgaagaagcagtagaaaaagctaagaagctttaatacggctgacgggaggttgatatggccgatacatcgttccacctgaaagttgtcagcgctgaaaagcatttatatgacggcgaagtcaaacatattcaggtaactggtagcgaaggtgagctcggtatttatccgcagcataccccgttattaactgccataaaaccgggcatggtacgtgtcgtaaaaacatcgggtgaagaagagtttatctacctttctggtggtattctcgaagttcagcctacaggcgtcattgtactggcagatacagctatccgtggtcgtgatttggatgaagcgaaagcgttggaatctaagcgtaaagctgaagaacacattcaatcctctcatggtgatgttgattatgctcaagcatcagcagaattagccaaagcgattgcaaaactacgtgtaatcgaattgactagacgctaatgtaaataggcagtccatgaataaaaagccagttagttatagctaactggcttttttgctttcagaaatattttgtgtaacgaaatatgtagtattatttggcataaacaggtttacttgccattctttacgggagttatcaggttaattatgtctaattcagctaaaagtgttgttattcttgctgcgggaaaaggtacccgtatgtattcacagttacctaaggttcttcataaacttgcgggcaaatccatggtgcaacatgtcattgataccgcaaaatcccttggtgctcaacaaacccaccttgtttatgggcacggtggtgaacttatgaaagaaacattaggttcacaacctgtcaattgggtgctacaagctgagcaattaggtaccggtcatgctatgcaacaagccgcacctttctttgctgatgatgaagatatcctaatgctttatggtgatgtaccgcttatcactaaagaaaccttagagcgtttaattgcggtaaaacctgctggtggcattggtttattaaccgttattttagataaccctatggggtatggccgtattgttcgcgaaaatggcgatgttgttggtatcgtagagcaaaaagacgcctctgaagaacaattaaaaattaaagagatcaatactggtatattggttgctaatgggggcgatttaaaacgctggttagcgaagcttgataataacaatgctcagaaagagtactacattactgatattattgcgcttgcacaccaagaaggtcgtaaaatcgaaaccgctcaccctactcgtcatagcgaaatggaaggggttaataaccgcttacaacttgccgcattagagcgtatttatcaaacagaacaagctgaacgcttattacttgaaggggtaatgttgcttgatccggctcgttttgatttacgtggtacgctaactcacggaaaagacgtggtgattgatactaacgttattattgaaggtgaagtcactttaggtaataacgttgaaattggtacgggttgtgtactgaaaaactgtgtgatcggtgatggttcgattatcagcccttatacggtgatcgaggatgcaaatttagcgcaagagtgtactgttgggccttttgctcgtcttcgccccggcgcacagctggcagacaaagctcatgttggtaactttgttgagatgaaaaaagccagtctaggcgttggctctaaagcgggtcatcttacttatttaggtgatactgaagtgggtgctaatgtgaatattggcgctggcactatcacttgtaactatgacggtgcaaataaatttaaaactatcattggtgatgatgtgtttatcggctctgatactcaacttgttgcccccgtttgcgtggccaatggcgcaacaattggtgcaggtacaacattgacaaaagatgtcaacgaaaacgaattagtcattagtcgagttaagcaaacacatatctctggctggaaacgtccggtgaagaaaaaacaataattttaagataagggcgtatatttcattatcgcccttttcttgtacgctattattctaaaaacaaaaatatccccgttttctaccatggcttggggaacaaaataatcaggtataaagacatcaagtgcgaaaaacgcacagttttaggaataacacaatgtgtggaatagtaggtgcagttgcacaacgcgatatcgcagaaatcttaattgaaggtttacgtcgtttagaataccgcggttatgattcagcggggttagctgttgtcgataatgattgtcatatgacacgtctgcgtgaagttggcaaagtacagatgctggcagaagaagcagaaaaaacacaagttattggtggtacaggtattgctcatacccgttgggcaacccatggtgaaccttgtcaagataatgctcatcctcatgtctccggcactattgccgtggtacataatgggattattgaaaactaccaagagctaaaagctgagttaattaaccggggctatcagtttgcctctcaaactgatactgaagttattgctcacttagtcaattgggaacagcgccaaggcggcacattacgtgaagtcgtacagcgtgtgatccctcaattacgtggtgcttacggtactgtcattatggatagtcgtacaccagagctattagtggcagcacgctcaggaagcccactggtggtaggtcttggtgttggggaaaacttccttgcttctgaccaactggctttattgcctgttactcgccgctttatctaccttgaagaaggcgatattgtcgaaattactcgtcgtcatgtgcatatttatgatgttaatggcgaagaagttaatcgtgatattattgaatcgaatgtgcaatatgatgcgggtgacaaaggtatttatcgtcactatatgcaaaaagagatctacgaacagcctttagccattaaaaacacccttgaagggcgtttaaaagcagaaagtattgatcttagtgagttaggatctaaagcaccagagatcttatctcaagtggaacatattcaaattgttgcctgcggtacatcttataacgcaggtatggtatcgcgttattggtttgaatctttagcggggatcccctgtgatgtggaaattgcatcagaatatcgctatcgcaaaccagcgactcgtcgcaatagtttactgataaccttatctcaatcaggtgaaacggcagatactctagcagcattacgcttatcaaaagagttaggttatttatcatcgctggcaatttgtaatgtggctggctcttctttagttcgcgaatctgaatttgtgctaatgactaaagcaggggctgaaattggggttgcatcaaccaaagcctttacaacgcaactggccgttttattaatgctagtggcctatatgggacgcattaaaggtgttgaagcccttgaacaacaagttgcaatggcgcttcatgcactaccgagccgtattgaaagtatgttgtcgaaagataaagtgattgaagctttagcagaagacttctcagaaaaaagtcatgcactcttcttaggccgtggtgatcaatatccaatagcggtagaaggcgcattaaagttaaaagagatctcttatattcatgcagaagcttatgcggctggtgaattaaaacatggacctcttgctttaattgatgctgatatgcccgttatcatcgtagcgccaaataatgaattattagagaaattaaaatctaatattgaagaagtgcgcgctcgtggtggtttactgtatgtgtttgccgatcaagatgctggctttgaagaaagtgaaacaatgaaactgatttctctgcctcatgttgaagagttaattgcgccaattttctatactgtaccattacagttactttcttatcatgtggcgttaattaaagggactgatgtcgatcagcctcgaaacttggctaaatcagtgactgttgagtaatattatttaatagtttattgccaattttgccccgtatcttaattttaggtgcggggcatttttaactcactattatttttaagttctttgttattaaaaaacattacaaaaataaataccagtgtaaaaagtgaatagattaaaaagtgcgtaaggtttttatttttttatcagataaatatattattactataaatatatcgaagaaaattaaaataaaatcaataaggtatctttttaatgtaacgcctaaaaataatagagatgttattaataatctttctacaatataaatttaaaatctatattttatctttgtaataatagtctagtgactagtcatttaaaaaaaatataaatcagttttaaattttcataaaactttaatcattgtcgcttaatctctagtcaatcatcataaattggcgtggtaagcgatatgttacagttcaatataaactcacaaaatggctcaatgccacatattcgtgtagagaatattcaaaagagatttaatcaatttattgctttagatggtgtttctttagagattaaacaaggcgagttagtctgcctattagggccttctggatgtggaaaaaccacattattacgttgtattgccggattagaaacacaagatcacggtagtatctttaattacgataacaacatctcacaccttccccctcaagcccgtgactatgggatcttatttcagtcctatgcattatttcctaacctgacggtacagtagaatattgcgtatggtttagccggtcagcctcgtaatgtgattaaaaatcgcgttaatgaaatgctggagttagttggtttacaagaccgaaagaaaaaatatccaggagaattatctggcggtcaacaacagcgtgtggcattggctcgtgctttggctcctgccccttctttactattactggatgagccaatgtcggcattagatgcacaagtgcgtgaacatttgtgtgtggagctacgtaatttacagcaaagcttaaatatcactacgctaatggtcactcataatcaagatgaagccatgctgatggccgataggatagctgtaatgaataacggcaaggttgagcagtacggcagtagtgaagagatttacaaccatccacaaacaccatttgttgcagagtttgtaggaaaaggtaactggttacctttcaatagaaatcagcacggtgaggcgatgattggctcacgagaagtccaattaaaacatactgcaatacctcataatcaagggcgtctcttttgtcgacctgaatcaatcaaaattaacccaatacaaaacaaacataatcaatacgatgccaatatacaaaatgtggtgtttttgggaagtcgttgcattatgaagtttgaattagaccatttaccgggacatttattacaagccgagatctctgctgctgagctacatagtattcaaaacggtaaagttaaagtgactttaccggctaatgaactacacatatttgcgtaaggtagcgagataatgtcagtgatagtacctaccaaatctattaatcgtttagatagtttatttgttgctggtggtaagttatttattatttgcttacttattcttggggttttattgcctttattggctattttctggcgaggttttacgcctgatatatcacaaggtggtggttttcaggctgccattgatttgttcaccagtgctaattttctgtggttggtgggtaacagtattagtgtttcgctaagcgttgctgttattacggtgccactggcttacctgtttgcttatgctctacatcgcaccttgatcccttttaaatccttgtggcgtggaatatcactattacccttactcgctccttctatgctaccgggtattgcattggtttatctatttggtaaccaagggctattgcgtagcttactcacagagagtatttatggttattggggattagtgcttggtgaggtgatctacacttttcctcatgcgctaatgattttactctccgcattatccatgtctgatgctcgtttatttgatgctgcatctagcttaggggcctcttcttggcgcacttttcgtagtgtcacttggtcatcgagccgacatgggattttcgcagcattgtgcttggtatttacgttaactattactgactttggtattccggttgtcgtcggcggagattatcaagtactggcgttagaagcctataaagccgtgcttggtcagcaacaatttggccgcggtgctttaatcggtatgttgttattgctacctgcattgttgaccttcggtgtcgatgtttggttacgtaaacgtcaacgtgatgcaatgagctcgcgtgcccaattctatttaccaaaagctaattttcagcgtgacacgctttatctaatatttgtgatgcttatttgcgcgctatttttattggtattcggtacggccgtttattcctcttttattcagttctggccttataacttatcgttttcgttacgtcattataattttgaaggattgcctgggggatggctcgcctataccaacagtattattttggcattttacactgccactatcggctgctttctgatctttatgggcgcttacttaatagagaaaacggcttctcactcttggcttaacaatctgctacgtatgttaagttttgtaccgatggccgttccggggttagtgttgggattagggtatgtatttttctttaacttaccgaataatccactgaactttttatacggcagtatggtgttattagtgctgtgctccattgcacactttttcactactgcctatatgactgcgagcacggcactgcgccagttagataaagaattcgaggcagcttcattatccttaaaagcgcctttatatcgtcacttttggcgtatcactattcctctttgtttgccggcattattagatatttatcgttatctatttgtttctgctatgacaacggtttccgcggcgatcttcctttatagcccagacactattttagccgcggttgcggtattaaatatggatgatgcgggcaatattggtggcgcggcagctatgtcgacattgattttaaccacctcggcaggagtttcgatattgttatctattgcttcgcaaggtgttcttcgccgtacacaagcgtggcatcagcgtgaagctaaacaataaatttaaaggtttaattctctcacatagcaatactaggaaaatcgcatgatgttaaaaaaactgatacttgccaccagcttattattctctgcgggaacggtctttgcagcgactgaaattacggtatacaccgcaatagaaagtgaacaattacaagcttataaacaagcatttgaggctaaatatcctgatataaaaataaaatgggtaagagattcaacggggattatcaccgctaaattattagcagaaaaagatcgtcctcaagccgatgttgtgtggggattagctgcatcaagtttagcaatattaaaagcgcaaaatatgcttgagccttatgctccggcgcagttagatgatattgatgtgaaatttcgtgatagcaacaacccgccaacttgggttggtatggatgtctgggcggcaacgatttgctacaacacgatagaagcacaaaaattggggttatctaaacccacttcttggcaagatctcactaagcctgaatacaaaggcaaaatcgttatgccaaatccggcatcatcaggcactggatttttagatgtaagtgcttggttacaaatatttggtgaacaagagggttgggcatatatggacaagttgcatcagaatattggtcaatatgttcattctggctccaaaccctgcaaaatggctgcatcgggggaatacccgataggcatatcctttgaatatccggcgatccaattgaaacgacaaggggcaccactagacatcatattaccgcaagaaggattgggttgggatattgaagcaacggcgataatcaaaggaactaataagcgagatgccgcgcaaaaattagctgatttttccgcctcaaaggaagcgatgaagctttatagtgctaattttgctgtattagccaataccagtgtacccgtaagccaaacagaattacctcgcgattatgctcaacgtttaattaaaaatgattttatttgggcagctgaaaagcgcgacaccattttaactgaatggcgtaagcgctatgacggtaagagtgcaaaataattattttttactttattaattaatagatagggtgcgatgcactctatctggtttagggtgtcatatgaaatttgatattgcggttattggtgcgggcattattggtttatctcatgcatatgcagcggctcagcgaggtttacgtgttgctatttttgagcgcagttacacgcctgtgggcgcttctgtacgtaattttggtcacggattaattttgggtcaagcgccgggaaaaatgctagatttagcaaaaaatagtcgtgaaatttgggcaactatggccaaacaggctaaatttttaacgcgtcaaaaagggacttatctattagcacgtacacaatctgagcaagctgttcttgaagcctttgtcgatggtcgagctaaaacctatggctatgattgtgaattactttctaaaacacaattagcgacggtttatggtggtcaattacaacaccataaagcggcgttgcatggcaaagaagatcaggtgctattttcgcgagaagcgatcccacagttagcggcttatctaggcagcttagctaatgtaacgagttatttttccacattagtacgggatattgatgtagatacggggacattgatcaccagtaatggaacatttagtgcagaaaagatcattgtctgctcagggcacgattatcaaacattattggctgacgaaataaaaaagcttgatcctatagtttgccgcctgcagatgttgcgagtgacagcagagcaaaatattggattggcgcatgcgctaatgacgggattaagttgtactcactatggtgcatttgctgatttacctgaggcacaggctttagcgaaagaaattaaaatgcaatcgccgttgattgagcagtatggtattcatttattaattaccccgactccttatggcgatcttattattggtgattctcatgaatatagcttagatgcacagccttttaacagcgaagaggttgataacctcctgatagagttagctgagcacacattaggttgttcggttcaagtaaaagagcgttggcaaggggtttatggggcaaaaggaaaggagccgatttcaattttaacgccgagtgaaaaagtcactgcagtattgatgcgaacgggtttaggaatgagtgttgggcctggtttaggtgaacaaaatattcgtcaactatttgattaatcttgcattagggatgtgaagttattttttaattatccaaagcaccgtaaaaccccgtccttcaggtcggggatataaggcgcggttttttaactaactcggtgtttcctgttgctcaatgtactggcggataatggatattggtgcgccaccacaactccccgcgaaataacttggcgaccaaagaacccccttgtagtaatcacgttgggcaatatcaggacgatcacgtcgaagtaatcgactcgatacccctttaaggctgttaaccagattagatatcgccagttttggcgggtaattaatcagtaaatgaacgtgatcccgttccccatccatttcaaccagttcaacatcaaaatcagcacaaacactggcaaagtagcctcgcaatttttcaattgcatcctgatcaaatatttttcgccggtattttgtgacaaagaccaaatggacgtgcatcaggaatacacaatgtctgccacggcgaatattagtttcatttttcatggaccaaagtataataggtaatatgaaacgtctacaagcctttaaattccagttaagacccaatggtcagcaagagcgtgagatgagacgctttgcaggggcttgtcgttttgttttcaatcgggcattagcacgtcagaatgagaattacgaagcagggaataaatacattccctatacaaaaatggcttcatggctcattgagtggaaatctgacacagagacacaatggttgaaggaagccccatcacaaccgttacaacagtcacttaaagatttggaacgggcttacaagaattttttccagaaacgtaccgcttttcctcgattcaagaaacgcggtaaaaatgacgcttttcgctacccgcagggcgtgaagctcgatcaatccaatagtcgtatatcattgccaaagttgggatggatgcgctaccgcaacagtcgtgaagtcgtcggagaagtgagaaacgtcacggtcagtcagtcatgcggtaaatggtacgtcagcattcagactgagtatgaagcgacagaaccacaacatgaatcaacctcaatagtcgggcttgatgcaggcgttacaaagctggccacgctttcagacggtacggtatacccgcccgtcagcagttttaaagtaaaccagcgaaagctggcaaggcttcaacggaaattaagccgtaaaatcacattcagtgccaacgggcaaaaacaaaagcgcaaaattcaacgtctgcatactcatattgccaatatcaggaaagactaccttcacaaagtcaccagcgaaatcagcaaaaaccacgcaatgattgtcattgaggacttaaaggtcagtaacatgtctaaatcggcaaaaggtacgacagaacggcctggacggaacgtaaaatctaaatctggtttaaaccgcgcaatactggagcagggctggtatgaaatgcgccgtcagcttgagtacaagcagctctggcgaggtggtcaggtactggcaataccaccagcctacaccagtcagaagtgcgcttgctgtggtcatacagcaaaggaaaaccgccagtcacaaagtcaattcgagtgccttgaatgtggatatacagcgaatgctgatatcaacggggcacgtaacattttagcggcaggacatgccgtgcttgcccgtggagggagggtgcagtgagaccgcccgtcgaagcaggaacccgccgaggtgattcagacatcagtctgaacgcagtagggatccacgtcctttagggcgtggaggatgtcaaaatattcaggttacgaagagagaataaaaaagagatgtctattttttacacatctcttttgcaataacatattcatttggtgcaaaagcagatgatttataacaactaaaatagcctttagaggttaaatcgagagcgacataaattgaaaagaaaaagctaaaaacgataccaactattgctattcctgtgcatatacccgctactttattattcattttttgtgttttttttgtgtatccacaaataaaaattagataagaaaaatagataatcaaaggggctgcaaaaaaaaacaaccctgtttgaaatgagaatagaattctatctttcatcataaaatagtttttgtagtagattatggagtcatagaaacaaaacaaagctaaagaaaaaaggaatattgcaattaaatacatttttagagagtttattttaaccatgactaaagtttccctacttttcagtttttagcaaaaattaaaacgtaaataaaatgaccatatgatatatataatagtgattgtaacataaccccatcttagctttttatttttttctaaaaaaagtaatgtaatacaaggtattaatatcaatataggctcagtagcatatctgacaatgaaaactattagtacacattatcagatttaagagatgtctattttttacacatctcttttgcaataacatattcatttggtgcaaaagcagatgatttataacaacgataatagcctttagaggttaaatcgagaccgacataaattgaaaagaaaaagctaaaaacgataccaattattgctattcctgcgcatataccagctactttattattcattctttgtaacttttttggtatcctaaaataaaactataatatgagaaataaagtattagaggcgttgcaaaaactaagagccctgtttgaaatgagaataagatcctatcttccattagaaaataggttatgtagtaacttgttgatatataaattgaaaaaatggctataaatagaattgcaatagaagataatatcaattttactggttctatttttatcaaaactaaatttctcccattgagaaagatggcgttgggggatagggaaggtcagttttcagaagaaattaaaacgtaaataaaatgaccatatgatatacataacagtgattgtaacataaccccatcttagctttttatttttttctaaaaaaagtaataaaatacaaggtattaatatcaatataggctcaataacatatctaccattgagtggcagttgacaaagattatcaatatcaccttcaccaatcatccattcatagtcagatatggaaagaatattaatcaatattaataaaaaaataaaatatagaaatataaaagtgcgaagtattattttcatattaaagaatacctagatatatctttatattctctattgaccaattacgcccattactgctttattgggcgttggtattggataatagttacggcttttgattattagcgatcctctgattaatatcttctatcaccgcaggtaaattggcaagggtatcaataatataatgagcaccagcggtacgtagtttattttcagcaatgcgcttacggttttctatttctgcctgttccattgtttgatattgttcaaaggtggcaccaaactcattgcctgaaacagataacccgacagtccacataccggcatttaacccttcggcaatacctgttactgcatcatcgactttaacacagtgtgctacactcattacacccagttcaatcacattctttaacgccatccaagggcctgggcgagagccggcggcaatttcatcactagcaaccacgcaatcaggctgataaccatattcagcggctttcggtactaatacatccattacggctttaggataacctgagcaagagccgattttaattccttgtgctcttatggtcgagatagcctcaagtgctccctcaatcggtttagcaaaatgtaccacttgtgcaatttgtaacggcataaaggtgcgataaatatgctgtgcctcttcttcacttggtgggtgaccaaattgggctgtccagcgagtacgaatattaggctcgttaagtaaagcacgaatatgatcgattttacccatccccatcggccctcgtgcttctgataaacttattttaaagttaaaggcttgagcaaaggcatcgacaaaaatttgtgtgggggcgaaagagccaaaatcgactactgtaccagcccaatctaaaattactgcttcaaccgatttattcatatgtttagacctactatgtgaaatcattattaacggcgaatggggagaatgtagaacatcctaccattaaaaaaatgggttattgtgatgtcaattttaagggggatttatgacataggtatgtcatcacaataaatatcaccgcaaaagtagtttggctctcaacattagatactaaaaaaagtaaataaaactaatataaaacacgattttaagatcatcatttaacgcataaaaaaaagagtgattttatttattaatcaataaattttattagataagataaaataccttttattatcatacatattttatattgtatgataaatttattaccgaattttattgtattgttctttcatcaaataaaattgaaaataaatgtttttattttaataatagagcgatttttcttaatccagtgtgttaaaaaattattttattggttttattgtttgtttgataaaaaataatttggttttattttgtttttttaggttttatcaaaaaataaaataaatctatttaaaataatgctctctaaaaacaagataaaatagtaaaaagtattttatcttaaacctcttttctatttttcaatgttcttattagctttagattattttatctatttctatcatgtgatttctagcagatcttattctatttaattaattgttattatggttttaaaaaatagatgcaatcatattaaatatatgtaaagtttaacgtgatgttattgataaataaatccacattttattttaaggctaatgctttttatcaagcattttattgcagttgataaaggccatcttgatttaaatatctagctaaaaaagacaaattataattacaagaggtaaataaaatgcaacacacaattaattcacaatatgatgaaatggttgattttctaaaggagttagtgaatatcgatagcggctcttatgataaacaaggggttgatacagtcgctgatcttttaattcaacgctaccaaaaattaggttttgttgttgaagtatttgaaaatgaacaactagggaataactaccgtttagttcataaagatgccacaaacccacaaatttttattgctgcacatttagatactgtatttcctaaaggaacagtagcagagcgcccatttagtatcgatggctcccgtgcctatggccccggtgttattgatatgaaagccagccatgttttaacttactatgcgattaatgcactcaaacaaagtggcgatctctcttatcaaaatgttgaaatattacttaactgtgatgaagaaatagggtcaaaaacatcgcgtcatttaattgaaaaatatgcaaaaaataaagcttatgcattaattatggagcctgctcgtgcgaatggtgccattgttagcgctcgtcgaggtgttggaacttatgagttgttgattgaaggtaaagcatctcactcaggtattgcaccagaagcaggaattagtgctattcaagagctttcatacaaaattcaggccctacatgcgctttctcgccatgatgaaggtctttccgttaatgtcggactgatttctggtggtacatctgtcaatacggttgcaccccatgcacgagctgaaatcgatgtgcgtatttcaacggatgagcaggggattgaaattgataagcaagtcagagaagtttgtagtcaacctgtgttagcgggggttaaattaacgctaaaaggtggcattaatcgccctccaatggtgaaaacacctgaaagtgccaatttaatagaaatcattaaacagcaagcggatttaattggcttagctattgaagatatttcaaccgggggaggatctgatgcctcatttactgccggtgtcggtacgccaagtgttgatggtttaggccctattggtggctatcaacatagtgataaagaatatctcgatttaccgtcattgaccgaaaggacagtgctatttgcaaatgttattaagcgtctgtctcaataaggtgaatgtatggaaaagagtaaaaaaataaaatgggctatgcctgatgcctttattattatttttggtatcgttattttagcggccatcgccacctatttgatccccgcgggaagttatcagcgggaaaccgttaatggattaaaccgcgttgtccctaatagctttaattatgttgcacaaaatccagcttcattgatggatgtgttttatgcaatccctgtagggttaaaacaatctgccagtattattttcttgatctttatgattggtggcgcgattgccatttatgatcgcacccgtgctattgattcaggtattaatgcgcttattgttaaaaccaaaggtaattatcaagctcttattattacggttgcttttatttttggtatgttgtcatcccttgggcttgcggccaatgccgttattgcgtttatccctataggaatagccctttcgcgctcaatgaaacttgatgctattacgggggttgcagttgtttatttaggctattatgcaggtaatgcggttggtgtattagatccaactattttaggtactgcacaaacattagctgaagttcctcttttttctggtgttatttttcgagttgtattattcgctatcttaattgttgtcactattgcttatattgtctggtatgccagacgtattgcgaatgatccaacgaccagttatatgtatggaatagctaaagatgatcctgattatgaacagccacacactcaatcattagatagcaccttctcattgaggcaaaaattgagtttggtggtatttatagcgtttattggattgtttttatatggcgcttttgaatataaatgggggattgaacatctatcagccatttttattatgatgagcattgttgtggcggctatgtttaaaattgcccctaatgactatatcaaaacctttatgaaaggtgctcaatctttagtgtatggggcattggtggtggggatcgccagagcggttattgttattttagatgaaggacgagtgcttgattctattgtacaagccacattagtgccattacagcaaacctctcacttttggggcgctcaattactttatttctttaatttactgtttaacttgctagtcacatcaggaacgggacaagcatcgattgttatgcctattatggtgcctattctcgatattcttgatcttacacgtcaaaccggtgtccttattttaaaactcggtgatggctttaccaatattattaccccaacatcaggtgtacttatggcggtactggcggtaggtaaagtgccgtggacgcgttgggttaaatttgtattccctattttaatgatttgggtcgtgataggtatggctgcaattggtattgctaccgcaataagttatggaccagtgtagctttgtactaacggattattaacgataaataggttattaagtataaataaagtgccgtttgtttagttacaaacggcctttttaaaccaacctcatggtgtcttcagttggtgttcaaaccctgtgactagttgctctaagccaaaattaaaacgcatagcaaaatcatcagcaaaaagaatttctcttacttgccaagtttgagggtatttatcacgtacaatttgttcaaaagcgagtcgtttttgcattaaaatttcactatcaataagcgtgatagcttgctgttcaatgcaacaccctaaaataaaatagagtaaggtcatcgacatattgcttgctaactcagcagatgcaccagactgcataattaaagtaataagcgtattgtttatacgtaacacattctcagaaatcacataggttccggcaaaaactctagcaccatcacgatgttgtaaaaaagcttctcttagttctgttgctagacgttttagatcagctttccaatcttggctatagtgaaaatcaacagcgacttcactgactatacgatctgccattccctcaataagcgtttgtttattatcaaaatgccagtagagagaggcggcttttatatgtaatgcatctgccagttttcgcattgttaagccttcaatcccttctttttccagcaaagaaagcgccgtatctaacacatttaatcgatcaattttagggcttttcataaataattctcattttcctcttttctatctaacaacgttagtttaacataattatcaaacctaacaatgttagattaaagcgaaagttaaatatcactaagcttcgcttaggagtagaaagatggaaaatattcaatcaaaaaaagaaaaaatcatgcagttagtgatggtttatacaccttggatcactgtgatatgtgttgttgcgtttattggtatagcgactgcagattgggatcgctggtggagtgatgctcgttatcaaacaacagataacgcttacataaaagcggactcaacgatattgaaatcacgaatgactgggtttatttctcagattaataaagaggattaccaagtagtaaaacgtggtgaggtcattgctgaaattaataagaaagaacaaatattaaatcggcaagcggcattagcagagtatcaaaaagcccaattagctttagataatctcactgaagaaattaaagaatatcaattaaatattgagaaattagctaatcgttatcaagcatcagttattgatgttacccaagctaagcgcagtccaatgttgcgtaaagatttaattaatagtggggctatcacacaacaaaattatttagatgctcaatctgatttgcaacgtttaatgaaattacaaagtgctgcgaaaaatgagtgggatcaggctaaacaagcactggtattactaaaatctcaagaaaaaatacgtctggcacaaaaagatatcgctcaaacacagtatcagcaggctgaaacggagctttcatacgcgactattaaggctcctttcgatgcgcaattaaataaaataaaagtcaatatcggtagccttgtgactgcgggtagcgaaattgtgactttaacaccgattaacgatgtatacattattgccaatttaaaagagacacaaataaaaaaagtacagccagaacaatctgttgctatcaaagttgatgcttttcctaccgatgttttttcaggaaaagtgagatatatcggcgcacaaagtagtggtgaatcagcacttattcctgctgataatgccagtggtaattttactaaagtagtacaacgtattccggtttatatcacgctcaatagtgataaccgacacttagctaaattaagagcgggtatgtctgtgcaagtgaaaattgacacagatagccttcctatagaggagggggagcgcagtgattaaattattatcagcagcacaaaatcatcgtcctatttttgttgttatggctgtttttaccggggctattttatcaacactctttgtacgtatgttttctatctcgttagcggatttaagaggcgtgtttggtttagatgttgcccaaggatcttggttgaatgtggctcttaatatagctcaattgatcagtatgactcttgtaccttggtttatggtggtttatggcgcagaaaaaatattaatcagtgcgagttttatccttttttgttgtggattagcggttcccataataggacaacagattggttttggcggactttttattgctcattttatgattggattttgtatcggagtctatttgccgatgacgatttcattagccttaaaaagtttaaatcccagtgtttggctaatcgttatggcggcttatagcttacgtgtttctgtaggaatggatgcgggagtggggatctcaggagaatttgttgacatattgaattggcgttggatttattggttatccgctattttcaccttagtcatcctattttttacctggtggggaatgccactctcacctattaataaatcattgctcgctcaaagtgattggggaggaatggcgcttaaatgcttaggattaacgctattatatattggtgtcgttcaaggtgaattgttaggttggtgggattctgggctggtcgtgtcttgcttaatcggtagcgctatactgatggggacatttattattagagcttatatttataaacaaagctttggccacttaaattggatcaaagatagtaatttacggctctgctttattattgcctgtttatatggctttttgatgttacctaattcgttatttataccttcatttttgagtgttgttggtgggttgaaaccactacaaataggtcaagttaccaatcttgccttctttatctatctattatgtagtccaatagctatttttcttgcacggcgtttagagccacgattaatgatgttaataggtattatgattattggaggagcatgtttaatcggtcatcaaattgattatcagtggcgagctaatgatttctttattgtcatatctatgcaagcaatgggggaatgtttgctacttatcggattaattgcctcatttgttactaatatcaagccacaagaagcgttacatttaggggcatatatttcgatagcgagagtattaatgccagcccttgcaggagctattatcaatacttatttgaggatctcatatgatactcattatgatttgttaagaggatacatacaaactggtgagcaaaaattagcagggaatattgctgaacattatcaaacaacgatggcattagtaataagagaagcacatgttgcctcttttattgatggttttgatttgattatgctcttggttattttaggtgctctttgtatgtcatttttaaaatcgtcaccagaaaatccggtagtcccaaggctagtaaaataaaaaactgcctgttttagtacaggcagaaaataaaataagaataatataataggagagaaatattcttgttacatcaatatgatgagtgtaaaaattaattgtatgatttaaatagtgattgattacctgctttatcaaaagcaatgacttgataaggttctttatagtcccctgcatacatacctaagctacccgctggcatacctgcaacagcaatgcctgtttgctttttatccattaagtctatattttttaagctatcgataggaatatgtccgactaagtctttgccttggtatgttgcatagtgacagcttaataaattatcagggactgctgcttgctgatatttttgcattaattctgtttcagagacaatattgacattaacatcaaagcccgcttcttttacaccatcagcccacaaattacagcaaccacaattttcggttttataaacttcaactacagcatgatttgccgcttgtacagtaccactaaccgttgacaatactaagagagagggaaaaagtaattttttcatcatgtattccttatagatacgaatacagagaacaataatctttccccctacaggaaggtcaattcaaataaagtataagcgtgtagatttttgtaaaaataaatatgtagggttaataatataaatgtctacataaataaaaaagccttgatataacatatcaaggctttatatattaattattttaattattaactttcattttaatatcacctgctaatttaaatccataacgacttaaaggtgatatttgtatttctgttaacttttcttttacatcaactttaatttcttcttgaggacgaatataaaattgaccaatactataaccgttattgcttggtaaagagctaaaagcgggagccatacgaataacttgtttaccattattctttaatattaattgattattgacttgttttacttctagatttttccaaggttcacgctctatggttaacccttttggaataattaacatcgcaatatcttgtctgataggcatttttgttgaattgacctttgcaacaccaataccttggaaagaggcttttaaaatttgttcatcatcaaattcaataccgtcttttaaaataaaattaatattctgactttgatctggctctattcttgtaataggtggagttataataatattttttgctatttcgtgttgtttatctaaatcgctgacttttgttgataataaaataggttcactacccgtatttttaacattaaaaatctttcttggctcttctgaatctaaaataacagtcatggtttccaattgaaaactagcatgagaaaaatgacttattaatagaatgagaaaaatcattccttttagtattttcataattagactatcctctttgtattacttacaaattgcatcaactttttcatataaaaagtctggattaaattcttctggaactgaataatcaacagaacagatgtcaccattatctgattttacttttagtggcttaccgatttgctcattacttattataacattaccgtcccccataataacacctattagatttcccttatcatcaataacactatttgctgtattaacaggtttaccatctggtttttttatttctaataaaacttgcttcattgtattgacagggatctcacgagaaaaaacagtaccttttgccaatgcaatatcaaaggatgttgtgcctaacataacattgagtggtaaatttttagtatttaatagaacagttgtttttttatttacaggtaagttaggaataacggcggtaccaaagtgattagttattgtcgtaccaccacccatagagttaactaaaataccagattgtcctggaacacgtaaaataccgaaagtatctcctaactccacaggagaagtagcaaataatccatcactataagcaatagcaccagatgctgtcagcatcgccgatttttgattactattactaaaggagcctgtcgcactaatttggctgtaagcggttgttgcattgatattaccgctaatattcttatctttactgtctttatcagcagttgccccgatagaatatctaaataaatcattatgataattactataatttgttgttaaagatgatgttttataatgttggtattgagtactaaatgatgatgaattattaataggtacgttgatgtttacaaatgtacgatcttcaaaattactacttttttgatagctaatattaaaagacataaatggaaatctttttccataagaaatggtatttgaataattgtcttttttatcaccataatattggctatagctaaggctataactcagtgatccataacgttgatttcctaagcttagagataatgagcttgatgtttttgtctgattattagcaagattatcatctaatgggtcttctatattatctatttgtagagattcatagagtgtcgaatagttacgtgaacgatatattgttgataagcctagtgagaatactgatacaggtaaacttaaattagcatttgcttggaagccatcacctttattagaagaagatgcatatttaataccaaagccagtagataaaggacgatgttcaccaaaaacgctatttacgctacctacaatggacttatattttgatgatatttccataccccctagaaaattatgatttaaataattaatgccaccttcaaaaccggtaataaaaggagtatgtatgcgttcatcacttgagttttttctatatttccccataaaaaagttaaagctggtactactctgtggattttttaagtctttatttgatgtaataacatcaaattcttgaatagtaccatcatcttgaataactttgacatgtaatggttgacttgatgatacaccactaatgttatttaattggaaagggcctgcaggtattatcgttctatataacaatcgattattttgtgtgacttcaacggtagccggtttttcagacatcccagtaataggaactgtcaacttactgttttgatagctactatctgaatataattgaaaaccattcacatcagcactatctaataactcactattagatgtaatttggcctaattgtaaaatggctttgatgcgttctattgtacgtgaaagcgttgtttcattaaatctatagtaagttttcccatcacctgaagaaaagctactgttattacgtaaaatccaattataaaaatttatacctgttttaaaatcaccttgataaaaattcctattattagagccatttaacttcataccatagattctatagttgttgaatacccctaagccaccataggttaattcattaccataggcactttgatcgaagtaatcatcattaatagtgatatcaatagagttgttatttgggtgataggtaatatctgatttaggatatatctctaaaaaatcagcacaatctgaatttatctctttttttttaatttcagcttatctattaattgattatttaagcaaagattacctgattcattaataagaatattatcagaatagttaaggctactatttactataattgttacatcatgataaccaggaagaaaatgacttccttctttaaaataatcagcgatttcactgccataaccaagagatttaagtgagtcaatatcaaactcgatatttttattatcagctaatgctaaattattgttaattagataagctaataataaaaatatcattttacgatatcgaaaatgcataatgaaccccatagtaaaacgtcgcgtttttaaattttaagatccaaatgaaaaatcgaataatagagagcctgaaagttctccaccatcgacaagagggccatttgtttcttttaaactataaattgttggtgaaatttttaactttaattgatagttattccctttcgaaggtgttacaccatcttgactaaatccgtttagagtgcctatttttaattgtgggcttgtttttattattccaatattattttcgttatctgtttcataaatattaacatcaataccatctactgtggctttttcaacagatacctgaaaaaaaccaatcttacctgttgtatttatagtgccaaggccaaaatgagtttgatcattatctgtggttgttcccattttttcatctgcttttattgaaaatagtacaggtgaaacaggtgaaggacagcttatatttattaatgtataacgatcatctaacttattattttcattagatttaaacatataagctttaagattatgatactctatggttatatctttttgtgacacaaaacaatcatcattaaatgatggtgctagatcgttataaatatctgcaaaagcagatgttgatactaatgaaatacttaaaaatggtaaggtaaaataaaaagattttataatattcataataacctaaagccagctagtgtagtttctttttctgatgtatttaactaattcgacctttataataatttttaattaattatacgcttatagaaaataaaaaacagtcttgtaatttaattggtgattttaaaatgggtttttatattctatatcaaatcggctactctaaaatatatagtctatataagataattaataaaagactttctatatctgataatttataaaaatatttaaataaaaacgtaagaaacccaaatgatttcttacgttttttttaattaaattccgaattggaatgttaatgtggctaaaccatctaacttagcatcaccatcactattttttagtgcgctattgatggttggtgtgacttcaaaatctgccgcaaatacttgaccgtcagcataatcattagcattactacgagcccaacctaatgaatcattttttactagtgtcttagaagtagatctgccatatctagaatccattacatagactttcttttcttcactagtcaaatcttcttttactgtggcatttttcattgaaactgtgtagtaacctactttagtatcaacagcctcttttccatcgactgccatcttataactgcctaaaccaaaataagaatcaccttcttttttttctgtcccagctctattatcagtaggagtaaaagctagataagtttttgcatcacaagttacgacaatattttttgattgaggctctaatgttaaatcaccttttgcagggaaaaggccaggagttacagcaaaagtatattcaacagtagtttcacttgtttcgccattgatggtacaagttggtggttggatatccccacttacttttaatttagcggttggtgtcgcagcgaaagcgatactacttgataaagtaagtaaagaaatagctaataagctttttttgaacatatatcctccatgagcgatataaaactatcttaaaaagattatttataacctctcatatcgtttgattttaaataataaaaatctcaagtttttagagtgactcaaagtatataaaaatcatctaaataagattgcatttatatattatactcgtatatataaatattaacacccttggttaaatttttcgcattaataatttaacaaaagattaaatataatataatttatcagaaaatgattttctttatttgatggagtttctatattttatacctaaaatataggtttttttcttgatggtttttttttgatattatcgagaaggttgtttttgtggaaaataagaatgtaagaaattagtttaatttcttacattctattttaaattaatttagattaatttaattaaattagataccaaattggaaagcaagagttgctaaaccatctaatttaggttcacctccgctattttttagttcactattgatagttggtttgatttcgaaatcagctgcaaatacttcaccggcagagaaatcgctagagcttttagcccacgcaaacactttttctttttgaagactttgagaactgtttacagcaccattgtagaatacagaaactttagcttcttctgcatcagcagttggttttactgtcgcatttttcatggtaataccatagaaacctactttagtatctacagcttcaccctctttgtttgtttcgtggtgtgtacctaaaccaaagttagccgcatttgcttctaattctgaacctgctctatcatctgtaggaacaaaagctaaataggttctagcatcacaagtaacagtaatgttgtgtgaaattggttctaatgttagattaccttttgctgggaaaaggcctgggctaacatcgaatttatattcaacagtagtctcacttgtttccccattaactgtacaagtaggggcttgaatagtaccgataacttttagtttagcagtaggtgtagcagcaaaggcaacactacttgttagagcaagtaaagaaacagctaataaactttttttaaacatacatcctccagtggaagtatatatatatcttaattcgatacatatatacctttttaatgcactttattttttcaaaaataataaaatgctctcaagtttttaagttgcttatttatattattatcttaataagaataccttacaaataattatacgctgataaaaaataaaaaatagtatttataattaaataaactttaaatgcataaaaaagataagaattaaatattttaatcttaataagatagtcattaaatgttatttaaatcaaaataagataattaataaattactttctttgtttgagtatttaaatacgagtcttattataatgaatgaaaaaacatataataaaaagtgtaaggtaattgttaaataccttacactttattaatattaaataccaaattgaaatgtcaaagtggctaagccatctaattcagcttcgccttcgatttttttcatttggctattaatgacgggtttgacttcaaagtcagcagcaaaagattttcctgcaacagatgtcttaccaggcaaagcccaaccatactcactttgtttatgaattaatgtattaggaactgatgtcgtggcgttgttagatttgatataagctttttcaaacttactaccatcttcttttttgacagtggcattgctgatattgatggtgtaatagcctacttttgtttctgcattttttccatcatctttatttttaaattgatagtgacctaaaccaaagaaggcttcactttcttggctctgtgttcctaatctattatctgttgcaacaaaagctaaataagtacttgaatcacaagaaataacaatgttttttgattgacctgctaactttaagtcacccttttcagggaaaagacctggagtgatatcaaagttgtagataattgtggcttcttgctcttcattattgatagtacaagtcggaggcttgatccttcctgtgacttttaatttagcaatagggttagctgctaaagtagtaccgctggataatgctaataaagaaattgctaataaatattttttaaacatacatcctcctatggcggtatagtaatttatcaaattatagccgtcattttttgatgcgttttgtttttttataaaaaatatttaataattacgtaatttaagtattttttcttacttaaaataaaaacaatcaaaaaagcttttgtgacaaagctaacaataaaacggtggcgctatattgttcataatccgatgataaattgatggaggaagcatcaatggataaggataaaagaagggaataaataaaaagacacataatgttttaatctttatatgtctttttaaagagtatagttatttaacaatgctcagttgttttacatcgatttcagtacttgtccactctttatcgatcttaccttcaatttttacggtattctcaggcgtaacggtttgaccacgccatcttttttggtctatttcaacattaatagcacctgttgtgtcttcaaaaacataaagctcatcaccaatttttttggtgattttgcctgttaagataacccaagtatcatctgaaagtgtttttgctttagcaacggtggtttcgctaattgaaggacctttaaatccaccttgctctgtggtggtgatagcgctttgtggggcaacaaaaccaccgctattttgttggtttgaattggcttgagatgcaaaagccaatgtactaccaattaataaaactagtatttttttcataataggctcgcttattggtttaaacattcacttagagatagattaattctagttcaattcttcctataaaaatgcatattaaagtaaatattggtattaatatatcaattttatcaacttgttattgataaatgatggtgtaattatttcattttattatttctactacacggcttttccgacgaatgatttttcttgcacaccaagcataaagcaacccagagataacgcccgcgatatgtgattctgtagaaaaccctaattgcccggggattaatccataagccatagagccgtaataaaacagcacaaataaggcgatgacgatatcgataattttatggcgagtaaaagcatgggcaattagcagtgaccataatccaaagatccacccacttgcaccgacatgaatagcgttacgcccaaataaccaaactaataacccactgatgataatgataaaaatacttgaatagcaatattctcgtaatgactgtgtcatcaataaaaagctaagtataagaaaaggtaataaattactaaaaaggtgagaccatgagccatgaataaaaggtgaaataaagataccgaataaaccttcgctgcttcttggaataataccatattgaagaagatggacagggaagaggctccctataatttgtaataagaaaagaaggatagttaaaccaccgagaatataaattcttctttttagccagagacgatccataacgataagcctttattgtaggtgatgacctttatttatgaatctactgtaaagagaagagcctttctgttagatggctcttcttctattatattcagtctaataaatttaagcaggcagctcctcttgctccacccgcatcaccataacgtgctttttctattgttggaatttgtgtattaccgtatacacaatgtgagagataatccggtaataaggtatacagtgcgtcaaattgtgataaaccgccaccaataacaattaaatgtgggtcaagtacagtcagaatattactaaggtaaatggctaatactttcatatagcggtcaacatgctgttgggtctgttcatcgccttgataatattgtgcaacgatatccaccgctctttgtggtgagccattaaaggctttatacatacgttcaaaaccacgaccagataaataagtctcaaagcaggcttttctaccacaaccgcacaatatttttggcatggtctcaccaatcacattatcagcatctacattaagattcatgtgacctatttcaccggcaataccatttttaccagagagtactttgccatcaatgacaaaaccaccgccaacacccgtacctaatattaaacccagtactgaaggataatgacgaaattcaggatcccatgcttctgataaggcaaaacagttagcatcattctcaactttgacggggcgttcaagaatattagccagatcgtggatcatcggtttatatttggcagcaggcacgttggtggtaaatacagttccttcttttgcgttgacgatgccaggaacaccgatacctatttttcctttactgcctaaatcattatcagcttctaaagtgagtgttttaaaaacatttaatagagcttgataatcattctttggcgttggtacacgtttttgccatacttgagtcagatctttatcaaaaacggcgagctcgatttttgtgccacccatatcaaaaccataatacatatcagtctcttagttatcctgtaaatgtaatccgtagcttaattaaatagagaagaagctatggtgcttaatggtcataacttcagttaacgcgttttttctctgtctattacttccacagattataagatttatcactatttattaaagatagcatagaaacaatcgtagataagcgcattttgtgatcttgtcaggaggtgaaacgttttttctaaccccatttttaatagaaaaaactatcataaaatgactagtttttagattttaataaagaaaatatggattaatatgataggaatactcttaaaaggagtggttccgaaaatgttatcgttaacattatatctaaaatagatggttgttatttgatgtatttttattagtataaaaacgtagttaagtgctatttaatgatataaaaaaacaaaaatatacgtattaatacttgtatatagtaatagtatctacaaggtgtgcattatttattataaatcagtcagttaaagatttattgttattatagtgttaaagttaattaatgtattcgtatctagtatatttattctttttattaagtattattaacaatattatttaatacgtaaaatataatcttggttaattatcctgattttatggttaatgatagttgtttttcctattaataaacaataaagaatattgttattaaatcatctcttttaagttattttttttagattatcttaatgggtctgaataaataaagttattttctttttatagcatgacaatgtgttagctactctatgaaaaaaatacacttttcgcttataaaaatgtgtctttttttgatgatgatcaacacaaaaaaacaacatcgcattttgctttgtgagccatattttacatttaaaaaagatcagtagctgaaaaatttcatattacttttctcaatgttttttcttcttagaataaattatattacaaggtaataattacaggattttatttttataaaatttatacaatttgttattagttttattacgttattagatggggaattaacctgcttttttacgttaaaaagagactttttttttgtgtttttcattaacattgtattaagtaaaaatacacagttagataaaataaaatacaatttgagcgaaaaatagttattttgaaggcgttgtatttcctattaaaataattatacaattcaaattaaataatcattacttacaattagacagtgtcttttttattagatgaaatattttacaagtaaaattactctgcatgatttaggtttgtataaataaatgaaagttgtcctgcaactcttaggtgttagcttttaaataagcttattttaattgtttttgtatccttatcttggtgaggtttttaattgtttgacaaggtattaggtgcgattatttaagggttcatattatgtatgatgatatagataatttaaaaaataagtttcaggaagaggggtttacttttcaagatttctcttctcaaacgacaggtaatatagcctgtaatattagtaatagtgttataaatcaacaggataataaagactccctatcaggggataatgaagagttcttgaatatatctaaagttaaaaagagacaaaaacaaacagctaatatagcgacttctctttcttattcacaagatttagcctcggaagtaaaagaaaaaaatagagttaataagcaaagtaagtgtttgctagataatcagttatttgaaaaaaaaaccacagataagtgcctagtaaatgaaaagctctcattgcaaaagatatttttatttattgcatcagctaattaaacaagctcttaaatataaataatattgacttatgtcaatttatagctattggtattttctttttttaaaagaatttattggtctatcgtaccaagaatgaattttttcttaaaaaagaaaataatagcaatggcaaggtacggggttatgaataaattatttaaactattaataacagtttttttattaataacaatgttttcgcttattgttatgccaatgagtgctaaacaacaatatatatttggtataattaatattctgctgttatttattattggctctaaaaagtcaaaaaaacgattattaacaatgatttttttatcattgttaatgtctacacgttatctgtattggcgagcaacccacacacttaattttaatacctctattgaagggatattgggtacaggattatttttggctgagatctactcttggattattttagttttaggttatttccaaacagcttggccattaaatagaaaaatagcgccattaccaaaagatatctcgttatggccaacagtggatatttatgtacccacatataacgaaagtttagatgtggtacgtgatacggttttagctgcacaaggtattgattatccaaaagataaaatgaaagtttatcttttggatgatggtagccgtgaagagtttaagcaattcgccaatgatgttggtgtgacttatattgagcgtgaagagcacgatcacgctaaggcaggtaatctaaatcacgcaatggcattaactgatggtgagcttatttgcgtctttgattgtgaccatatctctacccgtatatttttacaggcaacggtgggttatttccttgaagatccaaaattagctttggtgcaaacaccacactatttctattcacccgatccttttgaacgtaatttaagtgccgccaaaaacggccctcacgaaggtgcacttttttatggccctgttcaacgaggtaatgataattggaatgcaaccttcttctgtggttcatgtgcggtaatgcgtcgtagcgccctagaagaaattggtggtattgcggttgagacagtcacagaagatgcccatacggcattaaaattacaacgtttaggttggaattcggcatttattgatattcctttagctgcaggtctagcaacagagcgtttagcattacatgttaatcaacgtattcgttgggctagaggaatgacacaaatctttcgtgttgataaccctatgttaggccgtggcttaacatttcctcagcggttatgttatctcaatgcgatgatgcattttcagtatgggttgcctcggattatctttttaaccgcacctttactgtttatgttattcaacctcaatattatcgcctcttctgccagtatgatttttgcctttgcattaccacatttaattatgtcggtgtatgtaaactcacgaaatattggtaaatatcgctattctttctggggagaaatctatgaaacagtgatggcatttagtttagtactgcctacattgctcagtttagtctcgcctaaattaggtaaatttaatgtcactgataaaggcgatttgcttgataaaagctatatggattatctaacggtacgccctttgattattactgcgctacttctagttatgggtatttcatgggtcatcattcgttatttattaaatgattttcaaggcatcgaccctttagtcattgtattgaatttggtttgggcaacttatagtttatttattgtgttggcatcgatcgcagtaggtaaagaaacacgccaaattcgtaaaaatacccgcattaaggcatcacttcctatcactttacattttgatgatggcgctgaattacaaactaccaccgaagatatttctatggggggagtgcgtattgcgattaataaaatagctgaattacgccagcgtactgttaatagcattacgttaatggtgcaacgtgatgttgttacgcttcctgtggaaatggtcagtttagaaaatagccagttacgtctcgcttttttaccaatggatttaaatctacgccgtaagttagtacgggtgatctttggtcgagcagatgcttgggttcatcaaacacaatatcaagacaaaccattaaaagagttaggtgctatcactggctgtatttttgagttgttctttggtcgtcgtcaaaaagtaaaagcaccggtaaaaagagcaaaaacctctctctctgtgcaatctattaatggggatgactaggtatgaaaaagaaactgacatcaatactaagtctgacggttattgccatggcgagtattcatttttgctatgcgacaacaggaatgctagagctagatggtgaagtattaccagagccaacatcttatactcatccgccactacaacccacagtaagtacgcaactatttgatgatgttgcactctccgaggcgcgtaatattgaagagcagttaacattagctcagatggggagtccatcaccaatagtattatccggtcgacgtttattatccggcgtgacatttcgtatggcaaatgatctgtttatcgatagtgcgacactcaccatgaaagtgaaagcttcatcgggattagtgcaagccgatcaaacgttacatttgatgctaaatggtcaacctatgggatttttgcctttagaagaaggtgagcaagaacatgagtatatgttagaaatccctgaaatgatgttgaccaatgtaaacaacttgagttttcgccttgccagtcgcgatgctttagatgaaaagcagtgtattcctcctttagctgatgagttaagtttggtgatttcgcccgattcatcattaaattatcgaggtcgttggattaatggcgggtatagcttggaacgactgcccctaccgttctttgatcctgacagaatgacagcgacctcattacctattgttttagccgataaaccagataatgggcaggtaacagctgccgctattgctgcttcttggtttggtagttttagtcatgatattaaacaaatagatttacctgtattaatgaatcaactacctgatagcgatggtgttttaattggttatgccggacagactattgcaggtattaccttaccatcaggaaaaaatgggcagctcacaatagtcgataaccctgttgatcccgtatttaaattattactgattagcggtgatgatgaaaaaacattacgtcaagctgcatgggcattaaatagtggcaaattaccaccaaatgaccaattaacggttgctgctcaacatattccggtacgtcaggattatgatgccccacgttggttaaataccaatcatcccgtaacattgggtgagatagctcatggtcgtgatgattttactcgccaaggaataaatcatgctcctaatcaattttcgtttcgtgtctcacccgatctcttttggtgggatggagatgcgctacctttagatctgcaatatgtttttcctcattcagataaaataaatagccgtcgctcttcgctaattgcatctttaaaccatcaatttattggtgcgttatatccttctcgttcagagccattaggaatattaaggcagtggttagggatggagagtgcacagcaaagtagtacgctttatttagatccacgacaaatctacagtcaaaatcaattagagttctattttgatttacatgagtatgatgatgcaccctgtattttaacggatggccaaggattgattagtcgtattgatccgcaatcaaccttacaatttaaaaatacgtggcactattccagaatgcctaatttagcctatttttcaggtgcatcgttcccatttagtcgccgggcagatttttctcaaaccacattattattgccagaaaaccccacaactgaagagctatatactttagttaatttaatggcgagatcgggctattcaaccggtacacctgtttcttatatttctgtttttcttggtgcgcaagccttagaaaaaaatcagttagcacaaaaagatatcttggcgattggagagttaggtagtaacggctttttgccaagtgctttttcacaaaaaaccttctcttttataaataaccagcttgagatccaatctccctcattgatagataaagctaaaagttggttagccggtgatccattatcaccaagtagtgatgcggcaaattatcttgctccgttaaatgattggcggggaatgatgagttttatctctccttgggctaaagatcgtgtggttgttttagtgactgcaaaaggtaatgactcaattaaaaacatcattggtgatttgaaccatgcaaatgtcaatgccgctattaaaggggatctgactttaattagtggtcaagatacggtgatgagcttccatttaggagaacatttttcacagggagacctgcctctattacagcaatttctttggtattgcaccagacatgtctatttgcttggcatgttggcagtcggtttttgtgcgctaacagggagcgtggtttattgctggttacaacgccgctcaacgcgtcgcctgagtgaaatatcaaagcgtcatgttgataaatagggggaataaaatgaaaaaacagacacttaatatgattgttaaagtgatttatgccagttgcttattaggcgttacccattccacgcttgctaatgcaacagatgcgaatattgtcagctcgttaatagagcaagcaaattactggcatggaaaagcgcatgatgaacgtgctattgaagcgctacaaaaagtgctgatcatggaaaataataatcaagatgcgctgtatttaatggctttttttactgcgcaacaaggaaatgaaaaacaagccagctattggcgtgaaaaactggcacggattgcacctcaagatccgcgtattgcgggattaaaaaatattcgctcatctcaatttagtgaacaacaattgggttacgcgagagaattagcccaaaaagggcaacatgaagaggcaataaaagcctatcagcgcttatttgtcacacatgaaccacctgattcgctatcacttgaatattatcaaactatggctggaataccggcaatgttgccacaagcgattgctgggttaaaacaacgtgctcagcgggtgccagataataaagaaacacaaaaagcattaggattaacattaacttataacgaagaaactcgtcgtgaagggattgctattttaagtaagatttctggtgatgaaacggcgaaaaatggattaagacaagccttactatggcttaatgtacgtcctgatgatgaagggctgtatcaatcttatctacaaactaatcctaacgataaagccattgcacagcactaccaaggagcaatacaaggtaatgcccgacaagcggggtatgaagcgttaaacacaggtaacctaaagcaagcaacaacttactttaaacaagcattaacggtcgatagtcaagatgcccaagcgttagcaggattaggttatgtcgctctacgttcaggtgatttggcaaccggacaaaagttattaaaccaagcctctcagtcagggggggaacaagggcaaaaatggaaacaacaagcagaggatgcgggtttttattctcaattacgagaagtgcaacgacaagctaagcaaggtaatactcagcaagcactggataaattatcacctttaacttactcatcgggtgaaaaaggattatcagcacatttattacaagcggatttattgcgcaaacaaggtaatttacctgctgcttatcagctattatctgaactatatcaacagcatagtcaaaatgaaaaagttatttccgcatattactacttgcttattcaacaaggaaaaaacagccaagctgagcagttagtagcaaaacaacccgcatctttacgacaaaaattaacggcaaatactgatccatcagaaagattacgtcgtgatgcgcaaaaggcgttagaaaatggtcatcgcactcaggcaagacaattattaactcaggcacaacgtaaaaacccgcaaaataattgggtataccttgatttagcccgtttaatgatagccgaaggtgataaaacgcaagcggatcagctcattttacaacttgaacgtcgtcaaacacgtgatgccaattatattgcagcgctcttttatgttgaacaaaaacagtgggataaagtttttaccctactgaacaatcaacctcaacaaactgaggcggaaaaagcgttattagagagagcgcgtttttatcgtcaactgacacaagctgagcgttactataaaacgggcaatctcgttgcgatgcgcaatacgctgcgccctttaatcaaccaagtggctgattatccaaatgatgtaggggaattagctgaaaaactggtaaatagtggtgcacaagatgaagcactgcacttgattgaaaatgatctggctaaagggactaaaggctctgtgggaaattatgcagggcatatcaatgtgtttaatgcgttaggacgttatgcacaagcctcgagcttgattaatgatcccgcattacagcaacaaacgccagcagccgagaaacaacgtttagctatactgacaaatgttgcgcaagcggatagtttacgggaaaaaggtgaaatcaaagccgcttatcaaactctcgtcacctcattaaaggtaagtcctgatgatccagacttattaatggcattaagtcgtgtgtatttagcgcaatctatgccagagcagtcaaataaaattctctcttaccttgaaaaacagcaagggagagatagcaaattacttcaagcacaaattgaagttgctttggcgcaaaaagacggtcgtaaagccaaaacactgttacaacaaataccgacatcttcacaacctgcttatctattacaagcagcacaagtagcgcaattaaacggtgaaaatcgtcaggcattggcgttattgcgtagcgcacaatggcaaacgacaaataacacaacaggtacggtgaataccgcagcagggcagttaatggcactagagagtgaaaatagtgtgatgactggctctataaatgaagataaacagatggttgctgttcaacgctccattcgtcaattagagcagcagatatctccttgggtacaaggtggtattgctattcgtcatcgtaatggtgataagggattatcaaatttgactgaaatatcggcaccgattgctatctcaagtgttcctggtgaagattggcgctggcaatttaatattaatcccgtttcaatcaccagcggtacggcttctggagagcgcgctaatcgctttggctcggggcaattgcagcatgctgaacgttttgcgaaaaacagtgataatcatgatgaaaaaaacaaaataaacgcagatgatgcgggaagccagcgggcttcaggtgttgaattaggattgattttatctgatcacaatacacgttttgatgttggaacaacacctttgaataaagatagttccactattgttggtggactgacttactcaccaaaaattggccaaaatggacagttaacattaaccgcagagcgtagagcgattaaagatagcttactttcctatatgggacgtaccgatcctataacgggagaaacctggggacaggtcacgcgtaatggtgctaaagcgcaatatgcatgggatgatggcaaagtcggtgcttatattggtgggggatactataactaccaagggaaaagtgttgaaagtaatgaagaggtaaaagtttggcttggctcttatgcaaacttctacaaagatgagcaacaagaagtcaaagcaggtgttcatgtggactatatgaactttaaaaacaaccaaaattacttctcattagggcatggggggtacttcagcccacaagattatgtcgctgtctctttgcctgttgcttatacccgtcgttttgaaaaaggagaggtatcgctaaatggtgcgataggggtacagagttacaagcaaaaggggagtgattattttccaacccatgcttatatgcaaaatgcgttaaacaaacgtcatacgagtgactcacgtattaaatctcgttatgaagagcaagatgaaaccaatattacctatcgtttagggctcgatgctaaatattatttaaataaagagtcagaattagggctcagcttatctcatgatacatcgggtgattatgctgaagataatatgtggttatatctaaaatacaccccagactttttatctaaataattaaggagataagtaatgaaccaacatgatagcgatatattacagttaccttttgaaagcggttggcaagatctgacacaactattattttttcaaatagttagtgataacgatattacgcaggccgaaaataaattaagagatatcgggaaagatatcgctcaacgttacccattacctgatagcgaaaatatccagtcattagaatcacatatcaatcaagttttaacactgtttaagtggggctttgtgactatctctccagcaatgagtgagttgctattagtgcactgtgcatggccacatttttcagcaaatgaagaggaagctaattggcgtgcagcgagtgccagtgtattagaagggctatatgaaggctggcttactcatcaagggggaaatgataaaatgcatgtgcaccgtcaagctacagatgcaaaagatgcctttatttttcgttatgcgaatagttcatcagataaataataaaaactatgctttattgataagcataggaggaaaaaatgagtgaattagtaattaataataatattgttaatgacttattaataaagcaatttactaattatgtatttatgatgatagtaacagatataaaaggtaatattatctacgctaataaaaaatactgccaatttaatcatattaattttgaaagtataaaaaataaaagatataacttgttttatttagttgatgaaaatcaagatgtgttttctaacattagtgataataaagaggtaataagattagaggcaaaaaacccaaataaaaataaacaagaagtatgggaagatattaatatcgttccaatttttgataaaaataatctaatttctcattatgcatttttaagtttagatatcacggataaagtaaagttaagaaatgatttattaaataaaagctatattgactctttaactggaatggctaaccgtctaagtattattgagaaaattgaacaggagcgattaaatattgcgacaccttcatctttttgtcttgggattattgattgtgataaattcaaaacgattaatgatcaatatggccatgctattggtgatcatgttttatgtgagatagcgcagcgtttattagccttagaacgccagcaggtttactgtggacgacttggtggcgatgaatttgcggtacttttccctgctggattacgttcttgctctttattgttattggagatcatcgaatcgctatggcgaggaatggaaaaaccgataaaaatcaataaagaaaaaacaattgttccttctattagcttaggtattgctgaataccctaaggatggcaagacattatctgaactattaaagtcagcagataaacagctttatgcaataaaagagaaaggaggaaataaatacggtttttattcagagtattaaataacactatatttcaaataaaagtcattattaataaataaaaatctccttatctggagagggatacttatattttaaatagagagttttttagaaaagaaaataaaagaaattattttcaattaataacaatgtattgtttttatataaataattatttgaggagtatattatgatgaaagctgttattcctgtcgctggattaggcacacgtatgttacctgcaactaaatccattccaaaagaaatgttaccgatagttgatcgtcctttaattcaatatattgttgaagagtgtgcacaagcgggtgttgaagaaattattttagtgacacattcatctaaaaattcaattgctgatcattttgataccagctttgaattagagaatatgttagagcaacgaataaaaaataaattattaaaagaagttcgctctatttgtcctgaaaatgtaaaaattattcaaattcgccaagggcaagcattaggattagggcatgccatttgttgtgctcaccctgtcattggtgataatccttttattgtgttactccccgatgtgctattaaattctcactactgtgatccttgccatgataacttatctgccatgatcaaacgcttccaaaaaacagagcgtagccaaattatggttgaacctgtcgcactcactcaagtacatcaatatgggattgttgattgccaaggtgttttttgtccacaaggtaactgggcgcctattcgtcgtattgtggaaaaacctaatccagaacaagcaccttctaatctttctgtggtggggcgctatgttttctctgcagaaatctggccgttactcgatgggttgcctgcgggggttggcggcgaaatccaattaacggatgctattgatctcttattgaaaaaagaggttgccgaagcttacaccttagttggtaaatctcatgattgtggtaataaactcggttatatgaaagcctttgttgagtatggtttacataatagcgaactgaaagaagagttcgctcattggatacaagagttgtatgcaaaagatgtattatcccaaactatggccaataatcgcccaacactaaaagaagtcgataacagtgtgatgacaattttttgaggctattttgcaataatcagtagtatgccgaccgagtttatttagcggtcggcaaaagaaggagaaagagacaatgtccataagacagttatctcgattgactcatcgacttggtattttgctaacactaagtgtgatgttaatgatatccccaatgacacaagcgacagaaacccaagcaggatggcaacaatttaaagcgcgttacattactcccgaggggcgtgtcattgacagtgctaatcaaaatatttcacactcagaaggtcaaggatatggcatgttaatggcggttatgagtgacgatcgccaaacctttgcacaattatggcactggacggcaatgtcgctgtatcgtggtgatcttggcttatttaaatggcgttatgaacccgaaaataaccaacatacacccgatcctaataatgcaacagatggtgatattttaattgcttgggcattattaaaggctggggaaaaatggcatgatgaaagctatctttcagcgtcagattctattcagcatgcgatccttgaacacactttagtgaagacagaaaactacagtgtactcttaccgggaattaatggctttaaaactcccgaagaaattattattaacccctcctattttatctttccggcatggaaagatttctatcgagttagtcatgatagccgctggaaaaatttaattaacgatagccaatccttattaagaaaaatgcgttttggtaaatataaattaccaagtgattgggtaagtttataccctgatggtcatcttgccccgagtgaaaaatggccagcacgatttagttttgatgctattcgcattcctctttatttagcatgggcacaagataaactcgcattacaaccttttgtgaattattggcaacaatttgatcgtgataagacgcctgcgtggatcagtattgatggtaaagagcgcgctgattataacttaacgccaggtatgatggcggtaagagatctgacaatgaaaacagtaattgaaaatgttgatttaactaaggatacggattattactcttcagccttacatttattagccgcctttgcgcagaataatcacaatgactattaattagccccggtggatataaccattaaaataaaaagaggctagttatcagcctcttttttgttcgatatcaggacgagtcaataatcgtgttgttacagattactaatcccgatcaccttttatcagtaaatttgaaaattaattatctttgccaccggcaacgtttaatttgtcataaatatagttcttataactattaactaatttttcatcctcacaatcatttaatttgccttggcataaatgacgcatttgaatattggctttatagtaaggtgataaaggtaaacgagcgcgctctaacaacattccccctaaaaaattaatatccgttaattctccagtagaaagggttgcaccttgcgttaaattatcccttaaggtgaattgggtaatatgtgctggatcactaaaaggtgattgataattttttaggtcaatattaggttgatgatcaccaaaataaagaaacagagtggggcgctctctatttgcgacaaagtgagaaaaatcttcaatagccggatcactggcaataattttttccatatagtggctaaatttacccggtgcatcagggctttctgtctgaccagctaattgataatcatcactatgtgagcctttataagggccatgctcatacatagttaaagaaaagataaataatggcttatctgtatgtgtttttaagatttcttttagataattaatcatatcttgggtagggatagtccataaattctcttctaaactccccggataacccaattcttgtggctggataatctcatctacccctaatttttcataagcatatcccgcgtgataggcgttacgattaaaaggggtgagcagtacggtgtaatacccttgagatttgagttggcggaataaactttcattgagtttatcaaccacaaaatagaacacagagtttttacgcgcaccaaaatcatcggtatttagaccggttaatactgagaattcagaaagccaagttcctccaccaaaggtttgtactcgtaatgggctttgggcactgacaccttcatcttttttaaacataaaaagatcgggcaaatccacgtttttatcaaattggtaaatgcttgggtttacggtagattcttgtagtaatacaacaatatcgggttttacctcggtttgtgtttccggtaagaccacacggttggcttgctcgataaagtagtctgcactttgtgcatagtaagggggatgataagccgtttgataacccgacataattaaattagtcacagttcctcgaccaccgggaagcgtaccttcccactccgattgccatttattgactgtaaaatgaatagttgtaaggccaataataatgagtaataagctacttaggcgtgtagcaataggtgatttacgggagaaacgccacgcggtaaccatattaatgattagccaaatagccatggcaataatcgcgacaccggcttcccaatactgcgttaaggtgcctaaatttgagctatcaaaagcaaggttaaaatctgaaaatagcagtgactctttataatagtggactttaagctgattgataaacttgataatgataaagagtgtccctgttgtgattgccgagaatagcgcgcgggacgataaaacaaaacacagcgtaaaaataataaaataaacactgacagacagtagtgcggtataaattagagaagctttctcaaagacaataaataatgaagcaataagaacaagcgcaagatatatacgccctgataattttttcatatctcttccgagcatagtgattaaaagtttattgataaagacaagcgaagaataccttaattggctgaatgctcatatccagccaatcataaagagtaaccagttaagttagaataaccctttatctcgtaagatatgaagatcttttttacgtcgagtgaaccctgttcggtcaaaatactcaagaatttgtacggcaagtttgcgacctacggccagttcatcacgaaaatcggctgcggttacactgccgttagtttcgttatattttacgatgatagcggcaaatttttctatcgaatcatgagtataatagcgatcggcaataatggggataataagacctagttgagcagctttgcgtaataagcctcgtatgactttttcatcatttttcatttcatgggcgagatcacgaacccaccaaggctctgattgttgaaaatagtttttggcaatctgccatagtgcctcttgctctgctgtgaaggctaacccatgtgttggtagatgtagccagcctcgagtttgcttaatagcaccttcttggcgtaactgatcaattaagtgataaaccagctcatcgtgataagtgggaagagccatacgttttaaacgggaacggcccacacccatttgatcgttatgttgctggtgatattcttctagtgtgcgtaatagttttgctttagcctgttcggcattggctttcgaaatgacgacgccggaaatagaaataacatcaaaggtggttaatagcgtatcaagtgcggtttccgtcagttgctgtgcccaagcaaattgagtcaataataattcacctttgggtaaatagagtgcgaggttatcactcaccgtgttggctttatcaagtgcacttagccaagataaaaactcagcttgtcgtttaccccgacgaggagagtgtaagcagagcactttggccgccgctaaagttcgttgtgcactaatatcgcgtaaaattagtctatcgttatccaccagccacaagggttcatcaagaataagctctgctaatagcggtgtttcatcggtattatttaatagtgcaatacgtcctgtaatatggcgtgtaccatgatgaatatgaaccggttgccaatgtttaatagattcatcagctgttagactgactaatattttgtgtgaaggataaagtggtgcttgtgatagtaaccaatcaccacgagaaaccgtttctttactgacatcaccactaatatttatcgcaatgcgcatacctgcaccagcttgttctactggctgattttgcgcatgtaatgccctaattcttaccggtttgtctgcaccggttagccaaaaagtatcacctagcgcaatttgcccggcaagtgcagtacctgtgaccaccaaacccgcacctttaatactaaatacacgatcaattgctaagcgaaaacgcttatgccattgagggtgttgttgctcttgctgatgtagggtaactaaatagtctcgtaatggcgcgatacctacgccagttgaggctgaagtgacaaagatttgtggtgctgaccaacctagattaagtaagtgtgtggttatctgctgtttaacttcatcaatacgtggtggctctacacgatctgctttggtgaggatcacggtgatgttaggacaaccggcaagacgtaagatagctgtatgttcaatagtttgtgccatcacaccgtcatcacaagcgacaattaataaggcgtgagaaattcccccaataccggccaacatattagaaagaaacttttcatgaccggggacatcgacaaaaccaatgactgatccatcggtttgtggccaataggcataacctaaatcgatggtcataccgcgttttttttcttcaggtaagtgagttgtatctacaccggtgatcgcttgtattaatgttgtttttccgtggtctacgtgaccggctgtcgcaaaaatcatagtgatagagcctgtattaatgcattttcatcctcaagacaacgtaggtcgagccataagcgaccatccgtaatacggccgataataggtttttctaggttacgccaatgtgccgcaagggcatctaattgacttcctttcccatctttggcagcaaaggtaagggctgcactgggtaagctttcaatcggtaacgagccacttcctatttgcgaagcacatgaggatattgtgatatggtagttatcgccataatatgcctgaaaatgaggaagtaaccgttgcgccatatcatgaatttcggtttgtgtacgagtgagtaaacgtaatgtcgggatatccttgatcattttttcaggttgttgataaagtcttaaggtggcatctaatgctgccaatgtcattttatcgacacgtaacgctcgttttagagggtgatgttggatggcttctatccacgcttttttacctagaataattcctgcttgtgggccacctaatagtttatctcctgaaaaagtgactaaatctataccctgttgcaaatagtcctgtggcatcggctcgctaggtaaacccagtgcagccaaattggtcatagagccactgcctaagtctatggcggtgggtaaattcatctctttacccagcgcagcaagttgtgtaccttcaacttcagcggtaaagccttgaatgctgtagttgctggtatgaactttcattagcaacccagtattttcgttaatcgcattacggtaatcttttagatgggtacggttagtggttcccacctcttttaaacgacatcccgcttggcacatcacatcaggaatacgaaaagcaccgccgatttcaactaattcgccacgagaaacaaccacttctttatctggtgcgacggtggccagcattaataaaacggcagctgcattattattaacaatacaagcatcttcggcgccagttaattcacataacagatcggcaatagctcgatcacgatgtcctcgagaagcaccatcaagggagtattctaatgttgccggagagcgcatgacttggcttaccgcttcaatcgctgactctgccattaacgcacgacctaaattggtgtgtaataccgtccctgttaaattaaaaaccggttttatggcggcttttcgttgtaatgcaatacgattttttaattcttccgcccaattatcatgccattgcggtaactgattattttgtcgaataatgatacgcgcttcttcttgtagtttgcgtaaatgttcaacgataaaggtctgcccataaccatcaactaaagtttgaatgtcagcctgatggagcaaactgtctatcgatgacagttgactgtaaagtgaacgcgtatcatgtgtcatgttaatacctaattattattcattggggaatagaagggggttaatactactgcgtgcaaaaccttcttcttccatttttgcatcaagaataagggaggctaaatcgtcagctacagcatcgacgttagcatctttttcttggtataaaatttttaaataactaccacaatcgccacagctttctgctttgactggcgcattttcactatcaagagaccagtaatttaatttgcccgttagttcacaattagtacattttatacgtaccacgtgccattcggtttcacataaattacagtgtaaataacgcagtccttgagtggtgccaatttgtaccatactcgatacaggcatactgttacaaacggggcaaaattggcgattttcgccatattctgttttcgctttaccgggaatgtttgccgccagttgcgcccagtaaagtgataatgccgcccaaataaacactgatttatcagcggaaacttttgagtattcatcgtttaatagtgctgttgccatctcttctaattcggtttcagaggctttagagagattttctaaggcaattttagcactttcaggtacaacggattgtaattccgcaatgattgaggcgagtaatgcatgccaatgcttactacgcttaaaggtctttttatctaacggcgctatacccgtttgttgagaaagtaacggggttaaatctaattcaagcgggttatcatgtaatgctttttcttgtgctaaggcaatttcggcagcaaattcaagataatcagcgaaaggattgtctttggctaatgcttgaaaacgttcagcacgacgttggtagaggttttttaaattagggaataacaccggtggaataaagctgatgcttttttctgatggctctttacctaattgctctttaggaacgatgcgaatactcataacgttctatcttccttcatagtgtattacctacaaatattggcatcagaataatgcaaatttttacttgaagccatgacagcaggtaaggatatagtcaatttcttgtttatttacgcttgaagatgatcgggtaaataaaataaaaacggaggcaacagtcagcctccgtttgttcagcaaattagcgttagtgcattatttctgtgactgcttttcggcttcttttttctcttcttccagtacttcacgataccagcgaggatggtgttttttcgcccaaccgcgagtcacccaaccttcaaccatgctacgaattgagcctttcacccaaaacgctgcataagcgtgaacgataacggtaataattagtaagattgcggcaaatgagtgcaccagcaatgcaatacgaatcaccggaatggagaaatattcagcaaaataaggacgccagatgatgatgccactgaccgtcagcaggatcaaactgatagataatgcccagtaaatgcctttctgacctaagttatagtgaccaatatcacccgcttcttcattttttagcactttatgaatatttttagcccaaactaagtcatctttatcaataaagttgtacttcaggtatctgaagaacataaagataaacaaaatcgccatcgcactccccacaaatgggtgaagtaaacgtgacagttgaggcgtacctaaaatgttcataaaccagttcagagatgggaagaagaaacccaaaccactgatggctgtgaatagaaatacaatcacaacaacccagtgattaattcgctctgatgcggtatggcgaagaattttatcacctttcttcttcatcatttttgctcctccttattcacagaggtctgtgttttagaagatgcttccatctctttttgtgccgcttcttcatcttcttcggtggtgcggttagggccaacacctaagtagtggaagatagcacctgcaaatgtagcagcaaaaccaaccgccgctaatggtttccaaatacctttccagaatttaaccgttgagctaatttctgggttttctggtaaaccatggtacaggttgggtttatccgcgtgatgaagcacgtacataacgtgtgtgccaccaacgccttgtggatcgtagagtccagcgttgtcataaccacgagtttgtaactctgtaacacgttcattggcaagattaatcatcgactcttttgagccaaaatggatagcaccagtcggacaggttttaacacaagccggctcttgacccacttcaacacggtctacacacaaggtgcatttataagcacggttatcttcttcattaatacgcggtacgttaaaaggacaaccagcaatacagtaaccacatccgatacagtgctcagattggaagtccacaataccgttagcatattgaatgatagcgccttctgcaggacatgcttttaaacagcccggatcagcacaatgcatacaaccatctttacggatcaaccattccaatttgccattctcttcaacttcagagaaacgcatcactgtccatgatttagccgttaagtccgttgggttgtcataaacaccgacgttagtaccaattttatcgcggatatcgttccattcagaacaagcaacctgacaggctttacaaccaatacaggtggtaacgtcgataagttttgccacttcttccttgtaatcccgcacttgtggtgcgggagtaagggaattggtggcagagcgacgaataatgtcttgtgattgcagtgacataatttatctccttacaccttttccacattaacaaggaacgctttaaattctggcgtttgtgtatttgcatcaccgacgaatggcgttagggtattagcaataaagcctttaaccgcaaccccttcaaaaccccagtggatcggaataccaatggtatccactttgcgaccatcaacatcaagtgttctaatacgtttggtcactacagcttttgctttaatgtaaccacgtttggaactgactttaacggtgtcaccttgagaaatacctttttctgccgctaaccgttcaccgatttcgataaattgttgaggctgaataatggcatttaacagcgcatgttttgtccagaagtggaaatgctcagtcagacggtaagtcgtacctacatatgggaactcttctgctttacccatctcttcccagtcatctttaaacacacgtgctgctgggtttgaaacaacatttggatgcagtgggttggtacctaatggggtttcaattggctcatagtgttcagggaatggaccttctgccatcttgtcgatagcgaataaacgccccataccttcaggttgcataataaatggaccaacatcagagcctggtgcggcattgctatagtcaggtacatcaatacctgtccatttgctaccatcccattcgattaacttgcgttttggatcccatggttgaccttgtggatctgctgatgcacggttgtaaataatgcgacggtttaaaggccatgcccacgcccaacctaatgtgttacccaaacctgatgggtctgagttatcacggttagccatttggttgccgttttctgtccagctacccgcgaagatccaacagccacttgccgttgtaccatcatcacgtaactgagcaaatgagcttagttgctgacctttcttcaaaatgatattgccatcagcgtcttttaagtcgacaagggctttaccattgctctcttgagccacttcttcagatgttggattattaggatcaaagtaatcccaagtcatattcaacacctgctcaggcattgcgccaccttcttctttataaagttggcgtaaacgatggaaaatacctgagagaatttcaccatcaggcagtgcaattcctggggcatcagcacctttccagtgccattgtaaccagcgtcctgagttaacaatagagccgttctcttcagcaaaacaagtcgtaggtagacggaaaacttcagtttggatatctgctgttttcacatcattctcttcaccgtggttttgccagaaacaagatgtttctgtatttaacggatccatggtgataaggaatttcagttttgataatgaacggatcactttgttcttattcgggaatgaagctacagggttaaagccttggcagatatagccattgacttcacctttatccatcatttcgaaatattgcagaacgtcgtatggtttatcccatttaggtaatagtgagaatccccaatcgttatcacgttgagcatgatcaccataaaatgtcttcatcatactgacgaagaatttaggatagttaccccagtagttaacctgcccttggacggtcggttttggcgtattggctgctaaataggtttctaacgatgtttgcttttcagaaggcaaggttaggtaacccggtaagctttgtgataacagaccaagatctgttaagccttgaatattagagtgaccacgtagagcattaacaccgccacctgccatacccatattacctaacagtaattggatcatcgccatagtacgaatgttttgtgcaccaacagtgtgttgagtccagcctaatgcatacaggaaagaggctgttttatctttcgctgctgtttcagcaatatattcacagacttttaagaaatcttcttttggtgtaccgcaaatctgagtgaccacatcaggtgtgtagcgactaacgtgttcttttaatagattccagacacaacgaggatgttgaagcgtggtgtcgcgtttagcgaaaccattttcatccatctcgtaattccaagtggttttatcatattgacgtttttcaggatcgtaaccactaaagagaccatcatcaaaatggtaatcttcgcgcacaatcaagctggcattggtataagcctcaacgtactctttttgatattttttattttcgagcagatataagataacccccgataagaaggtgatatctgtacctgaacgaataggcgtatagaaatccgcaacagacgcagtacgtgtgaagcgaggatcaatcacaattaacttggctttattatggattttagcttccattgcccagcggaaaccgacagggtgtgcttcagccgcattaccgcccataacgacgataaggttggcatttttcatatcaacccagtggttggtcatcgcaccgcgaccaaatgttggagcaagacttgctaccgttggtccgtgtcagacacgcgcttggttgtcgacagccagcatcccaagtgctcttgagaatttctgggtcaaaaagcctgtttcgttacttgctgcggaggcacaaagcatccccgttgataaccaacggtttacttcaacaccttctttattgaatttttcgaagttggcatcgcgatcttttttcattaagcgtgcgatacgatcaaaggtctcttcccatgaaagttttacccatttatctgagccgggagcacgatattcaggatattgtaaacggcctttactatggataaaatcaacgagaccagcacctttaggacaaagtgcaccacggtttactgggtggtcaggatcaccttcaatatggaatatggtttcttttgcgtttttcgcgccatcgcccagactatacattaatagtccacaaccgacagaacagtacgtacaggtattgcgagtttcacgggcacgcagtaatttatactgacgtgagcctgctaacgcaacagcgggtgcaaaacctaaggcagccgctgtagtacctgccataccgccagcacagatcttaaagaactgtcttctgctgacctgcatggggtctctcctcatcatacattgcttttactgactctgattttcttcacgaaaacaggagctgattgtttttttattcctattatccttaataggatcaggttcattgcctgataggtagtgtaaaatcgttttacccgtattgttattatgtattaataaaattaggaattcatcttatggatgaaacaaaatcgacaaacttgttaactaaacgtgtaattgttggcatagatcaaacaactgtgcaacacaaaggctcccttaaccaagcagagcaggattatattgcactcgaagttccagttgcattagtgtacaacggaatatctcacgttgttatgatggcaagccctaaaaatttagagttatttgctgtcggattttccttatctgaaggcattataggatcttctaacgaaattcgcagtattgaaatcgttgaaagttgccatggtggcacagaagtacaaatagaattatcaagtcggcgctttatgcaattaaaagagcgacgtcgtagtatggcggggcgcaccggatgcggtatttgtggtacagaacaattagcagaaatttttcgccctatagcgccattaccttttacacaaacattttcactctctttgcttgataacgcactcgagcaactaaaaaccgtacaggaaattggcgagctaacaggatgtactcatgccgcagcttggctatctcctgaggggcaattacaaggcggttgcgaagatgtcgggcgccatgtagctcttgataagttgattggcttaaaaacacaacaaaagtggacagagggtgcaatattagtatcaagtcgtgcaagttatgaaatggtgcaaaaatcagcaatgtgtggtgccgaaattttatttgcggtttccgctgctacctcactcgccgttgaagtggcgaatcaatataatttgacgctggtgggtttttgtcgccgtggaagagcaactgtttttactcatccacaacgactcactgattaacgtatgtggtgaaacatccaaaggttgggttccagatagacaccatattgacgttgaatatcgatatttaacggtgccagccccataggaatggtgtagtcaccactgacaggaaatcgtaatgaagtccattgttgccatttttctgtcggtgcttcaattttcatagactgtggggcaattttgatcgtggtggcacctaagcgccaatgtgtacgtatccaaggatcaaagggctcatcattatcgtttttccattggcaatattcagcaaaagagtgcaatggataacaatgttttaatgtagggcgtacaggtacagcaacaccgaggtaaccttgtttttttgcatgctcctttaaggtattaattaagcgttgagcaatacctttcccccgataatgatgatcgatagtaaccgacaaagcagaaataagatggcaaggtaattgttgttcttcagcctccatgcctagctgaaaaacacgatcccaaccttcatctggtaaatcgttgagagagttggtttgccaaggtaacgcaatggagttaattacaccaataaccttttcttctgtttgcgtttttaataccgccataaattggtaatgggaaaaaggcacatcatataagcgttcccaatagctatcatcaacagaagttcccatcataaaagcaggccaatggttggctatcatggcttctgctttatctaacaaatcgttgcgatggtaaaaatcggtgataaatatattcatgatatacatataccttttgttaagaagcaataggtgtccatagttcacctaatttatagtcccactcttttggtttaatgggaatgcgccccgcattgggggtaaaggtcatttcactaaacagtagtgtggtttctgacattaaaaaatcgacccgacaataggcaaaaccgttagctaatttgttggctaatgtgagcatattgtcaaattgtagcggtttttcaatatattctggggtattgggatcttctaaagtaaaaggctgtaattgccattgtgtatcataaacattgatatactcgcatccctttgtatccgaaatatcaatttccgcataatgaggctgaccatgaaaacagtggatacggcatgtggttgggatcatcggacattgagtatcaaaaaggtcgatatactcttcacagataatttgcgcactaatatttttataatgccattcacgagtaacgtggtagagatttctctttaaatgaaaattaagtttcttttttgccatctccaaatcaaattgagatttatcaaggcaaataatagtactgccactgtcatgattacattttaatacgaaacggttaggtagtgtattaagttcgatttcatttggatggcgataagtattaaggattttgaccagatatttttcgcctatcttttcttttacatactccctgacactgattttatctgctaagcgtgtatagataggatctctatcaaataacatacgtgcattgattttttcattcaatgacatggggtggcgaaaattaggttgataacctaagttacgaataaatttattttttagataaacacgatctggctgtgcgagcgtgcgtaattgtttgaaataatattctaaaattttcatatgcaactgtttattttaaatatttaagtaagataaatataaatttttatttatataattttgccttaggagaaattaattttttattaatttagccttaatgtttttatgtatttatagaaaacaaaaatacaaaagaatacagatatattctttgttgtattatcatttttttatatagaatcaatggctttctagataagctttatagaataaaaaaactattatagaagagaaagcaatattgacattaagagagaattaataaaaagatgagaaattaaatatatattaatatgtagaccaatttgttatatttataggtctatcccagcggttaaaacgcaatcctttgcctgtcctatttccatgtgtatctaaaatctcataatactcttcaactatttggctacgaccgcgttgccattcattggtggtagcagcaggatcgattaaataaatatcacctacaacggtatataactcacctaaataacgaactttacgtgtggtggtggtggaatagtgagagaacatcacttggtaggttttatagtgttcaggttgcccataagggccatatttcatcgcaatatagcgaattcctttagtaccaacaggactcgtaccacctggcgttggcatatcgggtgtaatattaaaaagagtataacgtgagccaaccgttggttgccttagcgcttggcgataactatagctatccattcctgaagctgtccatgttctatccaccagaccatttcctgcccaacaatagcaagataaggcgagtaaagggaatgaaagagggataaacaaggctctagccaacataaatactcctttttattactattatgatgccagaaaactagggtgttattccgtaaaataacgctataacagcgtgccatttctgatgcttatccctttccattccaaaaggttattaaaaacagaaaataattgattatattttggacaaaaaaaacgtttagataataaaggtgaaaaggtgataaataagacagtgtagaggtaaccgtttatgaacccattaacgacattacgtgttgcaagcgtacaactacaacataaggctaatgataaagattataatttagccaaaatacatcagtttattgagatggctgccagtgaaaaagtgaatcttctagtatttcctgaaatgtgtatcacgggatactggcatgtccctaaattaccggcgcaacaggtttatgcattaagtgaaaaactggctgatagcgcatcattaaaatccattaaacaaaaagcacaacagtatgcaatggctattggtgttggattaattgaacgggataacaataataatttgtataatacttgggttgtttgtatgcctgatggttcattacaaaaacatcgtaaattgcatgcatttgaacatccggttatttgtagcggagatcaatacaccgtatttgataccccatgggggattaaaatgggtattttaatttgctgggataataatttagttgagaacgcacgggcgacggcgttattaggggcagatattttattggctcctcatcaaactggcggaacccactctcgtagtccacacagcatgaaacctattccaatggcgttgtgggaaaatcgtcagcaagatccacaagcgttacaagctgcttttcaaggtgaacatggcaaaggatggctaatgcgctggttacctgctagagctcacgataatggtatgtttatcatcttcagtaatggggttgggcgtgatgaagaagaggtgagaacgggtaatgcgatggttatcgatccttatggacgtattgtaaaagaaagctgtgcgatagaagacgatatggtcgtcacggatattgatttaacgcttttgcctgaatcaacagggagacgctggttaacgggcagaagaccagagctatatcagatcctcaccactcgacaaggtaatgaacaagatccgatttccgttcgttttggtaacaaagactaatagagataattataaaaagagcataattatttatcaggcaaaagattaacacctaatattaattttactaatttattttatgttagaataataaaagaaactaatataggtttgatgataaataatggatacacgtttattaaatgcttttgtggtgttagctgatacagggcactttggtgaagcttccaaacagctttgtattagccaacccgcattaactaaacagattaaaacgttggaatcacaactggatatcgtgttgtttgagcgtggtcgccatggtgcaaagctcacgcaagaaggacaatatttactcaatcaagctcaagtagtattacgggaatcccatattttagaaaaacaagctcgtcaattagttgagccacaaaaagtctcactttatgcgggattcggtctgtcatcattaagttttattacttcactattggcgaaatttaatcaaattgagccaaatattagtgtcaatattgatgatatgtcttctcataaaatggaagaaaaattattaatgggtgaacttgatgtggctttttctcgtttacccgttatgccccctttacaagggatagcgttgacacaagagcaactgatgttagctattgcaacacaacatattacggtgttggaggcagattataacccattacattatttcgactcattagggcttattctacttgctccagaaaaagggaaaaaactgtatcagcagatacatgcttttttacaacagcataaactagcaccgcgtttattacagcaatctcaagatattcagacccaattagcgctagttgcagctgggttagggatagcattagtgcctaaaagcgcgcaattaatttgtgataaacaaagagtcacattgttacctctatctgggttatacacacaatggaaaattggtgtaatttggaatagtaatattaaaaataaagaacgtgatctttttattaaaataattactgaaaaaattgatattaaataaacaattagctttctttatttcttttaatataaatattctatttcaatttttagtctctattaaatattaattagttttaaaataaataggaataatcaactgagatcactctcacaaaaaataaacataagtttataaaggttttatttaagctttatgataaaaaataatttaaaacattaagttaaatgatttttgttttgttaaatgtatttaatgggaattagcgtgctttaaaagatctatttacaataaaataagaatgtttaatatcaaagggcagtcaactcaagaaaggtacttgccttgttttaatattgagtaagaaagagagaattaaaatatctctctcatggataatttattagtgataataaattatgatcttatgtaataaataataaggaagttattatgaaaaaaataaacatttttacgggtactctatttgttttatctagcataagtatggcacaagcagaaatccattctaatcaaagtggccctttaaccaccatgagtgtgggggcgagtgatcccgtgactcatggccctcatcaatcagcaggtggggagccgggtgttggtatttctaatctatatgggggtaaaaaaattggttttgcgtcattaacaccaaataatatgagtggtggggcggatagccatggtgtttatactgtccaatctaatcatcatcataataatcttggcgtttttcatttttcacaggtgactgatgccaatgtctattttggtacttgggcaaaaacagcctctgttacagatatcactcatcagtcttattatgtaggtaaagaggttactagtacgctaccgacagacagtgcaacttataccgtaacaggtatcagtcaatatagtggtgataatttactgtctggtacttttgatgttgatttttcacaaaagacaattggtggttcactggctaatagcctacgtactgtcgagttagaacgtggcaatatttataccgcaaataaccaagtaactttctctgcagatgcaaaagaagataccacatccggtattgttgaaggggcgttctttggtgaaaatgctgaaacattggctggtattgtcgtcttccacaccgatcatactaaagatattggttttggaggaagcaaaaatagtgctgaagtagatactgcaacagatagcgtaacagatagtgcagaagcctcttaacgttaggttttaagttcggagcttaaaaacaatttagtccttttacatacgtggtattagtggtcattaagctagtttttagcaacagataatcaaatatacggttatctgtttttttttgccttaaaaaacggattgtaaggaatagatctattgttattataaggataaaccatgcgttattatcaaaggctaataaagtcattatttattattaatatcttatttcattcgtcacagggggcggcaacacaacctaatcaagagcagcttaataaagagaaggtcgctcaattaggtcaacaactgtatcaccatttacagcaacagcagtggtatcaagcggaaaaactattagttaattatcagcaattaccattacacgaaactttattagtctattatgctcaagcactattagcacagaagaatggtaatttcttacaagctgaattttattatcagcagcaacttaagcagcaagcagattttattccggcacaaacaggtctaattcagctctacttttctcaaggagaatataaaaaagcacaataccagctaaatcaattaagtcgtttatcgggattatcacctgccattaatcaagcaattatctattatcagaaacagcttaacgattattttaaagctaggcgtttttatcaaatcagttttttttatgatgataatattaatcatgcaccttatcttgatgagcaaattgtttcgcaatcaacgcaagtcatcatgaccagaaaaggcgctcaacctatagcatcgatgggggttagtcatcttttttctttctatcagcccacttttatttacgctaataataccctatcaggctatttttcagcacgctaccgtgattattttgcatataaacaagctaattttacacatttatatactcaattaagttatcagtaccaaaaaaaggattatcggtggaccttatctccttattatgaaataaaatcacctaaaaaggcgtttgagtatcaatctattggggtatataccgggctatttttctctattaataaatatcattctattaatttatctataaattattatataaagaaatataataaagaattaataaacttaaataatcataagcagctatatgctattagctattactatacattagcagagaatgttcaattagttaatcaattaaactattatagtagtcgtaaaaaaaatactttattaaattatcagcaatatgatataaaaacgggtgtttattacttattaccaaaaaattggcaagtttctctttctttacaatatcaatttaaaagttttaataattataatccattattaaataagaaaagagaagataatggctttgtttttacaacaactattaaaaataaagcacctattatctggggtttttatccagcaatagaattaagttatacccgtagattaagcaatgtggattggttatatcaatatcagcagcatgaagtcttatttaaattagaaaaacaattttaattaatttaatgcatgacttctttattaattaagtaggtaacacaatgcatgtagtgctttttcacaaacgtacgttagtctccatgatggtttcactctccttattttctctcaatagttattccaagacgaaggataatacaaccgatcttggacaaattcaggttgcagataatttagaaaaagatcaacaaggttatgctcaagtctatgaaaaggatgtggctaatatttatttaggtaaagcccttattgaacgttatcaaggggtatcgcctgcagatttatttaaaagcgcgataggtgtttatagtggtgaagcccgtaatggaggagcattggatccgaatattcgtggtattcaaggccaagggcgtatccccgttactgtggatggtactgagcaggcgattacggtttatcgtggttatagcggtgcatctaatcgtaactatattgattcaaatttgataagcagtatctatatagaaaaaggtccttcacttaatcctaatataaaaacagggattggcggaggggttgccattaaaacattagatatacgtgatattgtgcccattggtgagtcttttggtattaattttaaaggggatattagtaataatgccacaggctataaagatatttatatcaatatgattgaagattatcgtaattatccaaaattctatcataaatattcttttttaactgatcccgcattagaaataacacctgaaaaaaataaagatttaaagtttaatgactatgcgtttcgtattggaataggatttgagaatgaaaaatttaatttactctttgcatatgcattacgtgaaaagggaaattatttagcaggtaaaagaaataaagacgattatcttaaaacagattacatgcatgagatacatgctacagatcataaattcaggttaacaccttatgtgccttttattgctcatatttatcgacctggtaatgaagtgccaaatacatctaatcgtaaccgctcttttttagtaaaaggaactctatttccacaacaagcgcatcgtttctccattaattatcgatacaccgatttattatttggcgatattatgccattacgtttaagttgggctcgttatgaagaaaatttagttaatcaatggcctttggcaaatattacacaacaagcaggcatattaacttatcaatataaaccagaagataaaaaaacagatttattactgcgtttatggggcaatttaacgacaggaaatactaatactcgaggaggagcacctcgacaacctaagaatagagatataactaatgattttgatcgatatttatttatgaaatcaaaatctgaaagtggtatgagttatgacactgatactcgttttttagatacagcttctctatatcaagataataatcgttatggtgttgatttttcatcgttatttaaattatcacctcagttttctatttctttttccggtcaatatcaattggaaaaattagatagtcatgagcttgaacttcccatgggttttgatttcgtgaccgaggggcgagcagggcaacgtcatgaagtcaatttagcgttagccacagattggaaaccattaccctggtttgcgatgaatattggcggtaaatatcattactatcatctgacggatacctttttaaataataaacggaagaatagggttaaaaattacgagaaaacagcccctatccgcggttatctgatctcttatcgacgagtattaacgccagaagagtatttactctatcgcgcggttaataaaattgatgtcgatactttacctgacgagttaaaaaattaccgaaattctgctgagctgagtaaaaaaattagagactttcaacaagcggatttagtttaccctgaaggtggcgctttgctagaggaaatcaaggagcagatagttaggccatatcttcagagaatacagcatgatatggagcatgaagattttcttcgtaataaccatggaaagatgcaaataaaaaacgctaaagctatcccgatgaaaagagagtttagcctttggttatttgatgaaaatggcgtgctatctaagagtaagaatattttacttaatggttttcttgatatggaggaaaaagtccctcatccagtgacgggggagttagtctatcgctttgaaaaagatgttattaatcctcaggcattttctctatcagaagatattcaagatccctacgcactggagcctagctatcagcatggcgcattttcccctttaatctctgccaccctttatgccaacgatatggtgcgtttttatggccgttatactgagcaattgcgtttacctaacttatttgaagataccagtggtttttcaggctctaaagctcgctattatggttttaagttaaagccagagcgtgccaaaagcagtgagtttggtgtggttgttgattttacgcattggttgaatatagagcgccatgctgatattaaaattaattactttaaaacgaacattgaaaatgtatttgatagagatgctaattggcaaattagacagttagaaaaacaaatattagaaggtgtagagttacaagcccggtttgataatggatttattttctttgataccgcattagtgtatagccataaaaataaagtctgtgatgaaaatgctttttatgagcttgatgcatcaggattatcgggtattaaaaactgtatgacagggggataccctggcggatttttgcgcacctcaatgcagcctaaatactcagttaacctacatttaggcacgcgctggctaaatgataaattagaattaggtagtcgctggctctattcatcagaagttgaaaataaagatgagaaatggcttaaagaaaatttacctaatagctattttggcataaataataatccgatgcgttgggcaaaagtatttactattgatgcttatgcaacttatcaatatagccccaatttatcttttgaaataacaggaagtaatttattaaatgaatattacattgatccgctgacccgttctggtatgccggcaccaggaagaagtttgcgattaggtgtaacagcccaattttaatacaaggataaaataggagttttatttatgttggcactttctgtcagacagccacttaatatttattattggctcattgcgatatcattagtttatatcagtttattgagttgggtgcttaattcatggtctatgacagaaagtgcgcaccatattgatcagcaacagcaaaatacattatcggtctatcaggtgatgttttcgccacctaaacaatctactaccatgattgaaccgagaataaagatcgagtcacaacaaccacctattgcactaccaagaagtgagaacggtgaatttattgaagcgcccaaacaacccgcaaaaaagcgtcaacaacaaccgaccccaataacacctaaagtgataaaacaggtaaaaaaacagccagtagtagacaaaacagtacctataaaaccacgtgatttaacaaatcacaacatagttcaaagtacatcacaaccatcagcagaaaacttaacacagcataccgcgagttcattggctgggagcagtcgtgcattaagtgaaaatggtattggacagggagagtctgaaaatcactatatcagtttattgcgccgagaaattgagcgtcataagcgttatcctgcgcaagctcgtcgtatgcaagatgaagggctggttgttgtgcgtttttcattaaccaatgaaggctatatttcatccgttgcacttgaacagacctcaggggtggcatctcttgataatgctgcacttgccgcggtaaaacgggtaaaaccaattggcccgaaacctaataacttatctgatcctttaactatctcgttaaaatttcaattaaattgaataaaaaatacctaagtcaatattacacttaggtattttatggaaataaaacattagaataaaacagtcatatcagccaacaaggtattaggctcaaaaaaatagagatgaaaatagagatttttttgatcttcttgactaaaaatacaagataaatcaatttgataagtataaaaataacttttattatcggaaataggatgattaagtaatggggttattttataaataatattatcttgatctgtggtgagcttaaattcagcagaaccaataatagtgccttgggtcgcatcgcccgttcttgccactatagctaatgattgttcctgcgtaattgcacactgtaataacaaggtgattttttgtgataaacccactttgccaatcggctcttctgatggtaagcaaaaataggcatcgtgatttaacaaaatacaatttttccccactaacatatcactatagccatattgagctttgcttaattgagtcataaacccatgatttaaatcgagttcatagctcttttttgctgtgggtaaatgatttttagtgtcaagaggtaaggatgcataaccatcataaaaacgaaatataggtgcagattcggttaaccaagctcctgagtcagcttgacagctttttccattgtgacgacttaaataaagatttacgccattaaagcagtagccaggaatattaagatacgatttattatctcgattaccttgaccgatagtaaaactattattgttaacatcatcaagtaccatatattttaaccctccccaaggtgtgtcagaaatatagcgaacggagggtaaaatttgcgttggtgacagataggctttctgactgtctggggtaaaaaatgtgtcgttttttataacatcatggctatctcctgccacgccattacagccttcatattgaaaactatctacctctttttcaggtgttaagtagttctgttttaaacggatcactgcatcaatatgagagtaggattcaatactttgtagcatggatgttctatgtaatatatcttttcccatctcaacgtaagtcttgtaataactgatttttggatcatggctatagtcatttccataaagctctaagctattccaacgagcaaagggggttgtaaattcaatttcaaaactacgtttaacccaagtttgatagaaagataaaccagaagtatagatacccactaaaaaagtattacatttattataatcatctttaaaaacttgggaggtctgctgataaatggctttatgaatattggcgttaaatttatcaatgctgtttcttaatgtttttagattatttttgaaataatcctcttccagagcaagtttttctttattggttaatatatcgcaatgggcggcgacaaaaagtgcgcaacagtggcaataaaaaggcaatcctgctgattgtgctaaatttaatactaatggttgttgagcaataattgtcgaaatcacatcatcaaaacggttaagaacttgttcccgtaaatctcgtagttgtgtttctgaataatgcacattggggtcaaggtaacgagcgagagaatctgaaaataattgataaacgtcgctaataccttctgtggtgagtttaatgatttttatattgttatcagtgattttagcatcaataatacgagagacatgggcaataatttgctcagctaacgagctatctttcatatttttattcatgaggccaaaaagcgcggaagtaatttttgaaagtactcccccaacaacaggtattagaccaatgatatgacccacgaccacttcacccaccataataggcgcattaagcggatcttgttgattaaattcatccacaacagtgggtaatatattactgttgcgattaatcatatctaacatcccatcctttaagtcctcatattcaatgcaggttaaaggttgagtgcaggggagtgacgaagggcttattgatatttttaacggatttaaatgcataaaagagactccttctctgacgtagtattatttaattccatttttctattaattgaggtgtacctgataagccgttataaacagtgatagataattctgtaccacggatttctacggctaaataatctcctttaaatagcgcaccactattataaactgggacatcgccgaagatctcactgccaccataacggttatcttgaccaacataatgggtatgcccaacaaataccgcttttaccccgtaatgttctagcatatatttaaagaaggtcagctcttcttgagatgatttttctgggaagtgttggtttccatcatggaagtttaatatgatggttttattgctatttcgggcctgaattaaatctttttctaaccaatcaatagaatctgtgacattaatggttgaagctgaccagtgatcgagcaccacatgataagtgggatagttttgtaattgtacaaaatgaatatcaccatattcccaagagtaagccttactacctgaatattcgctactatcgtatctaaaattacctgaagtcgcataattacgatactcttcaatacggtagtgcatatcaaaaaccatgccccttgcacaggcattcatactgtaatcggcattactcggctctgcacagtcccctacattgttttgatagtcgtgattaccaagtccaacataggtattaaatcctaaaggtgaaggggcaaacagtgcacgaaaactctcacgttgggagcgacggccaaattctgttaagtcaccatttataatgccaaaagcaaaagatttttcacggtgtaatgcttgaatactgtctctaacgctttttacggtggtttcccaacgggattgatcattattggggtcattattatctagatctagacgccaaggttgtggatctgacatgacaataatattgtaatcagtagattgtgttgttgtcattgcgatactccttgttacatttttatcggttagcctcctttttgacctaaatagccataaactacaattgcaaagtttattagtggactgtgcgaaacattggagaaagtagtgaaaaagagaaagcggcgctctagaaataaaacctatagagttaccgcttttttatggtgaggtaaattgattaaatggctttcttctgtgatttattcgcgatccacagtccgctcattttcatcgagtaaccaaataaaataccgagaatgagtgaagggatagcttgtgttaaatgaccttgtgcggcaaaaatagtacatgcgccaataaaagtacccggaatataagccagtaatgtgcttttagcttgcacacacattacaaaggcaattacaccggtgacggcgtagccaaaaatcgcactatcattaaacagttggctaccataaataatcgctaatgcccaaataacaccactcataatagtcgcaatcgtcacgactaagcctttaaaaccttctttagggtaggcgaaataagccgtgcaacctaaaaaaccagcccaacttaataagtcaaattggcttgcaacaaatgcccaaatggcagaaagaatgcctgttgtcagcgcagtaaaataaagcgttctcacgatagactcttaaaagtagtggggatatttaccctgttaactaaaggtgaagtttagcattgtcattagttgatttactatatttagatcattaaacatcatcatttaaataacaaattttttgctatctgaaatctatttatctattgaaaaataaaaagataaagtaaacgattgctttattagatttatcgttaaataaaaaataaccaagtatgttgtttgatatatattattaataggttaattaaaatcgagtatataaataatataagaaataaaaataattaatttatgacactctttttgaaaaaagcattacctaactttatatcgtatatatgcaatttttacctgctataaccggtaaagtaatatttacacgctatagcaggtaaatggctaaatgttagctaatctaacagcgcgtgctttcattccatctaatattgtattgctaatctcagaaggaaaatcctcgggtaattgctgttttacgcgttgtatgacatcgtccatttcttgataaaaataacgaagaatatcgctcattaatgaaggatcgaaaccgacagcttcagctgtttggtagaaatgacgaggaaaaatttgttctatggcgtattttttgcctcggcttgcttttaatcccatagcaagttttgcatctcgtggattaagtcctcgtcctccgaaattgggatagatggacataatgtcataaaggggagtgagatggaaacgtccttcttggttgataaaaacagaaaaattctttgcgtgtccatccgttgcagccaaaagccaaaatagcacttgtgccttcataaaatgaaaacgatcttgatcggcatttgatgagccaagtaaatatttcataatatcgataatgccaggccctccttcattttcatattttagcgcagaaggtatatttaaaatttggcaaaaatcttcttgaggtaaacgtattatccacgatttatcagatgaatattttctatcaaaacgttctacagcaagcgctttaacattttttgttttaataatagagcagtgggggacgggaagatcaaattctttggcaattaaggtacaaagatactcattttctacactattggataaatccattgtataagaatgactttcaataacaccaattggcagtttaataatatgggtagttggtgtgttattatgtggcacacaccaatgattatcttttaaaagtaatgctgttttttcttgtgctccagcgatggaaattctgaaatcagtatattctttaagcataccgagtggagtattggatttatatcctagtagaattttttcaagctcaatatcattgagtttttgatattctatttttttgatatccgcaggcgtactgccactaggaagtaaccttaatgcaccaacagtatctgcaccgatagccgctaataggtcaaagggttgatttgagttcgcattatagcgactcacaatacgatttctaatttcagtattatcaggtaacagattatcaaagaaattatagacacagtctccttgatattcttgaagctgtaatggcatcgaaagagagatgggacgacttcctggttgattaacccaatcttcagtatattggaatgaatgcgcacctgagctttttttagtaaagatgcccacatagtattcattcatatatacatcaagactcgccatttaccactcctctttccattcacttttgtgtgctaaattatttttagcatctttaggatgaatttccatctctaaatttagtgcggagagcagtttgaaaaaggtttctagtttggtggaattaggattaagttcaaaattggacacggtatcttgtcggatccctactttttgggcgactttactttgagacagtttttttgttaatcggacatcttttagatgcacactgagttgataggcattaattatgatcatcatcttctaccggttataggcgttaatatctaatataccggttatagcgtgtagatcaagatttaatggttatagcgtgtagagttataattacctgctataaccggtaaagtaatatttacacgctatagcaggtaaagtttggtcgttacttcccaatacagaaactagagaaaattcgccctaataaatcatctgatgtaaattcaccagtaatttcgcttaatgcttgttgagcaagtcttaactcttctgctaatagctcacctgacttggcataaaccaattgctgatagccttgttgtaggtgttcagcggctgtgtttaatgcttgtaaatgacgacggcgcgctaagaagcccccttcagtattgctgttaaagcccatggcttctttaaggtgtgagcgtagtaattcaatgcccattccatcacgggcagataaacggatcatcggatagtcaccttgcgaggtgatctcggcaggttcacccgttaaatctgatttgttgcgaataacggtgaccggcagtgtgctaggtaaacgagccataaactcaggccagatctcttccggtgtcgtcgcctcggtggtggtactatcaaccataaagaggactctatctgcttgctcaatctcttgccatgcacgctcgataccaatacgttctacttcgtcactggcttcacgtaaacctgctgtatcgataatatgtaatggcataccatcaatatggatatgctcgcgtaatacatctcgtgtcgtacccgctatatcggtgacaatggccgcttctcttcccgctaatgcatttaataagcttgatttaccagcattagggcgcccggcaatgacgactttcatcccttcacgcaataggctgccttggcgcgcttgcgtacgaacatcgtctaattgactgataaccgtattgagtttgccctcgatcaccccgtcagaaagaaagtctatctcttcatcagggaaatcaatagccgcttcaacatagatacgtaaattggttaaggactcgaccatctcattaatatgagaggagaaagcaccttgtaaagagttaatcgcagagcgtgctgcttgctctgaactggcatcaattaaatcggcaatcgcttcagcttgcgctaaatcgagtttatcgtttaagaaggctcgctctgagaactcaccgggcttagcaatacggataccgggaatttgtagaatacgctttaagagtaagtcgagaataattgggccaccatggccttgtagttctaaaacatcttcacccgtaaaagagttaggattagggaagaaaagggcgataccctgatcaagcactgagttatcttcattgcgaaaaggaagatagtcggcataacgtggcttaggtactttgcctaaaatagtttgtgctacaacagccgctttagggccagaaacgcgtaggataccaacaccgcctcttccaggaggtgtggcctgagcgacgatagtatcagtgctatgcatggtgaactcgcttaatcagaataatcattaatcgtataaaaataaaaaaacagaaggcggcctattagaccgccttcactattttatgtcacttttctttgaatgtaaccaaagaagaggtttttcctgatgtgaccttattttttgtctctactatgtagcccacgtttttccagaccgcggtagattaactgctgctggataatggttactaggttactgacgatatagtacagaaccagacctgatgggaaccacaggaagaatacagtaaatacaaccggcataaaggtcataattttttgttgcatcggatcagtgactgctgttggtgacagtttctgaatgatgaacatcgtcacacccattaataatggcaggatatagtacggatcttgtgctgataagtcttggatccataatataaatggtgcatgacgtaattcaaccgagcccattaacatatagtataaggcaaggaagattggcatctggataatcagcggtaaacaaccaccaagaggattaactttctcttgtttgtataacgccatcatttcttggctcatacgttgtttatcatcaccaatacgctcacgaagtgccgccagttttggttgcagtaaacgcattttcgccatagaggtgtattgcgctttcgtgagtggatacataataccacgaacgataaaggtgatcatgatgatggagaaaccccagttaccgataaagctgtgcaggaatttcagcagcttaaacagtggctgagagataaaccataaccaaccatagtcaacagataggtctaaatgtggtgcgattgcagacatttcagactggatctcaggcccgacccataatgttgaagtgatatcctgtgtgctatttggtgcaacagtaataggtgctgatttataaccaatcagtgcgatagatttattatctaaagtgatagagtagaagttgttattctgactatctttagctgggatccacgcggttgcgaagtattgttgtaacatcgcaatccaaccattgttggttgtgatagaaaggtttttatcttcgatatcaccaaagctatattttttatagttggtttcatctgatgaataagccgcaccacgataggtatgtagcgcaaagttgctacttccagtatcacggtgttctggtaacttaacagattgttttaactgaccataaaagttcattgtcagtgttttatctgttgggttctcaactttgtattcaataccaatgtcatactgaccttttttcagaataaaggttttgacgaatttcacgccttcttcattcacaaaagtcataggtacacgtaattcatcttggttttcacctaagataaattcttgttgtgtggcactgtagacagggcgagatttctgatctggaccatcagggccaattaagccactttgagcctgatacaggaattgaggtgtagtttccagtaaacggaaaggggtttttgaattaagctcggcgggataggctaacaaatcagcctcatcgatagtaccgccctgagtattgatacgaagatcaagtacgtcagtttttacggtaatcaattttgcctgctcattgctgttaccagtcacagcaagactatcactgcttggcatgtccgcttgttgcgagacctgagtagtagtggtggtgttttgtgatactttatcaccctcccactgctgccagatcaggaaagaaacgaacagtaaagcgatgaatagaagattgcgttgcgaatccatcgttaattttctctgttatcgtcgttttttctaggtgggacaggatcatcaccaccttcgtgtaaagggtggcattttaatatgcgtttcactgttaaccaactaccttttatcattccaaacctgcgcaatgcctcaataccataatgagagcacgtaggattgaaacgacaacgaggccccaacagaggactaatccccagttgatagcccctaatcagcaagatcaggatttttgagccaagcgacaatgacgacgccataatttacccaacacttccgtcaattggtggttatcaagttcagctacccccttccttactaataccacaaaatccatagcaggtaattgatgctgatgtaaacgaaagtattcacgggctaatcgtttaatccgattacgctcatgagcacgtttaacgtttttctttgcgatagttagaccgatgcggggatgccccagctcattctggcgacccaaaattgtaacttctggtgaactcgcacgctgtggctgctggaaaacaaaattgaaatgcttgggagttaacaaacgtaactcccttggaaaagcgagcttaaccacggaatggttagcttttattatttcgaagaaacggtcagacgagcgcggcctttcgcacgacggcgagccagaacctgacgaccatttttagtggccatacgagcgcggaagccgtggttacggttgcgcttcagtacagacggttgaaaagtgcgtttcatagcgatttctacctactttatattattactgattcagcaaatgcgttgacagacaggagtgcaataaataaacaaaccagtacttcaatcgcagcatcaatgatggaaagatgcgggattgtaataaaatcactcaaatgcgtcaatgaagatgacgttttaagtaccgatttttgtcgtcttttttagcaaacccgattatcaatccttacttatgcgcaacgctcgctcttatcgacaccctaaaaagggaagataaagggcgaattgttggtacaagcacgcagggtgcaagattatacggactcagggtgaaagcgcaaggatctttggtggatcatcatgcagataattgatcatcctttataagaagagcagaaatttacctacagaaagttatccccaattgctatttatagggtgactcaagtacactagaactcccttacctatttatttcggagaattatcacaaataggtaagcctgtggataaaaaccataaaaactgtgtaaaagaaagaggatcttcgtttcattttgcgatatgatcccccgtcacgatcagaacaaccagtctgcgatcgtgaagcacgatgtaaaaatcgtggtcatcaaagttgttccttattaagaattgaagaggaacggtgttgtgtacctaagtgtttaatcacatttttcctgtttattttttagtcttgtttttgaggggagtccgccgtgtcactttcgctttggcagcattgtcttgcccgattgcaggatgagttacctgccactgaatttagtatgtggatacgtcccttgcaggcagaactaagcgataacacgctggcactgtatgcacctaatcgttttgtgttagattgggtaagagaaaagtacattaataatattaatgcgttattagtcgacttttgtggttctgatgtcccttcgttgcgttttgaagtggggaataaacctgtatcagcacgtaccaccgagagtgttcccaaaaccgtgacacatcccgcggttaattccacaccgactaacagccagcctgtgcgtcctagctgggataatcaaccgcaatcccagttacctgaacttaattatcgttctaatgtgaatcctaaacataaatttgataatttcgttgaaggtaaatcgaaccaacttgctagagctgccgcaagacaagttgctgataatcctggaggagcttataacccactgtttttatatgggggaacgggtctgggtaaaacgcatctattgcatgcggtgggcaacagtattatggaacgtaaagccaatgctaaagttgtttatatgcattcggaacgtttcgtgcaagatatggtaaaggcgttacaaaataatgctattgaagattttaaacgctactatcgctctgtagacgcgctattaattgatgatattcaattttttgccaataaagagcgttcacaagaagagttttttcatacctttaacgctttgttagagggaaatcagcaaattattttaacctcagaccgttatcctaaagagattaacggggtagaggatcgattaaaatcgcgctttggttggggattgactgtagccattgaaccaccagaattagaaacgcgtgtggcgattttgatgaaaaaagcggacgaaaatcaaatccagttacctgatgaagtggcgttttttattgctaaacgactccgctctaacgtccgtgaactagaaggtgcattaaaccgagtaatagctaacgcaaattttaccggtcgagccattaccatcgactttgtgcgtgaagcattacgtgatttactcgcattacaagagaaactcgttactatcgataatattcagaaaactgtagcagaatattataaaattaaggtagcggatttgttgtcgaagcgacgatcccgatcggttgcccgtccgaggcaaatggcaatggcgctggcaaaggaattaacaaaccacagcttgcctgaaatcggggatgcctttggtggtcgtgaccatactacggtactgcatgcttgccgaaaaatagagcaactgcgtgaagaaagtcacgatatcaaagaagatttttctaacttaatcagaacattatcatcctagcgctatgaaatttatcattgaacgagaacagctgctaaagccgctgcaacaagtcagcggccctttaggcggtcgcccaactttacctattttaggcaacctgttgcttaaggtgacggagaataccttatcgctaacaggtacagaccttgagatggagatgatggcaagagtgagtcttagccaatctcatgaaatcggtgcaacgactgttcctgcgcgtaagttttttgatatttggcgcggattacctgagggagcagaaatcagcgtagaattagacggtgatcgcttactcgttcgttcaggaagaagtcgtttttctttatcgacactccctgcgtctgatttcccgaatttagacgattggcaaagtgaggttgaatttactttgccacaagccactctaaaacgtttgattgaatccacacagttttcaatggcgcatcaagatgtgcgttactacctcaacggtatgttatttgaaacggaaaacacggaattgcgcacagttgctactgatggtcaccgtttagcggtctgtgccatggatattggacaatctttacccggacattctgttattgtgccacgtaaaggtgttattgaactgatgcgtttacttgatggcagtggtgagagtttattacagttacaaattggcagtaataatttacgcgctcatgtaggcgactttatttttacctcgaaactggttgatggtcgtttccctgactatcgccgcgtattaccgaaaaatccgactaaaacagttatcgcaggttgtgatatcctcaaacaagcgttctctcgtgcggcgattttatcgaatgaaaaattccgtggggtgcgtattaacctcactaatggacaattaaaaattaccgctaacaaccctgaacaagaagaagcagaagaaattgtcgatgttcagtatcagggggaagagatggagatcggttttaatgtgagctaccttcttgatgtgttaaacacactcaagtgtgaagaggtaaaattattactgactgatgctgtttcaagtgtacaggttgagaatgtggcaagtgcagccgcagcttatgttgttatgccgatgcgcttgtaatcacgattaatatgattttatcccgtttattgatccgccattttagaaatattgaacaggctgatttgccattagcggatggttttaattttcttgtaggaccaaacgggagtgggaaaaccagtatacttgaagcgatttacacattaggccatggacgggcatttcgtagtgcccaagcgaatcgagtgatccagcatgatgaaaatgcgtttattttacatgggcgtttaagtggccttgatgaagaaagtcgcggttactcaattggtttaagtaaagatcgcgagggtaacagtacggtacgtattgatggtagcgatgggcataaaattgcagagttagcgaagttattaccgatgcaattaataacccctgaggggttcacattacttaatggtgggcctaaatatcgtcgtgcttttatcgattggggttgttttcataatgagcctcgattttttgctgcatggtcagatttaaaacgcgtcttaaaacagcgtaatgcagcactcaggcaagcgtcgtcttatcgacaactcttaccttgggataaagagcttatcttactgacagaacagataagccaatggcgagctgaatatacagaagatatcgccaaagatattgaagaaacgtgccaattatttctccctgaatttaccttgaaagtcagttttcaacgaggatgggataaagaaaccgattatgcacagttgctagaacgtcaatttgaacgtgacaaagtgttatcatatacctcgttaggtgctcataaagcggatttacgtattcgtgctaacggcactccggtagaagatatgttgtcacggggtcagcttaagttgttaatgtgtgcattaaggctggcacaaggtgaatatttcactcgtaagaatgggcaaagatgcctgtatctgctcgatgattttgcttctgaattagacgcaaatcggcgccagttgttagccgagcgtttaaagtctacgcaagctcaggtgtttgtcagtgcaatcacctctgggcaagttaaagatatgctagatgtaaatagcaggctatttagcgtagaacatggcaaaatagaggttaaaccataggaataaagcgagaaacgttgatgtcgaatacatatgactcctcaagtatcaaagtattaaaagggctggatgcggtgcgtaagcgcccggggatgtatatcggggatacagatgatggaaccggtctgcatcacatggtcttcgaggtggtcgacaacgctatcgacgaagccctcgcgggttactgtgatgagattattgtcactatccattcagataactcagtctctgttcgcgatgatggccgtggtattccaacgggtattcatgaagaagagggcgtttctgcagcagaagtgattatgacggttctgcatgcgggtggtaaattcgatgataactcctataaagtctctggtgggctgcatggtgtaggggtttccgttgttaatgcgttgtctgaaaaacttgaactgactatccatcgtgatggtaaaattcatcaacaaatttaccgttcaggtgtacctgacgatcgcttaaaagtgattggtgaaacagataagtcaggaacctttgttcgtttctggccaagtcttgatacctttaaaggtgagactgaattccaatatgatattttagcgaaacgtctgcgtgagctctccttcttaaactcaggagtctctattcgtttaattgataaacgtgataaccgcgaagatcatttccactatgaaggtggtatcaaagcattcgttgaatacttaagccgtaataaaacgcctattcaccaaaatgtattctatttttctacagagaaagatggcattggtgttgaagtggcgatgctgtggaatgatggtttccaagaaaacgtttattgctttaccaataatattccacaacgtgatggtggtactcacttagttggtttccgtaccgcaatgacccgtacgctaaacaactatatggataaagaaggctttaataagaaatcgaaaatcagtgcaacgggtgatgatgctcgtgaaggcctgattgcggttatttctgttaaagtacctgatccgaaattctcatcacaaacgaaagataaactggtttcttctgaagttaaaacagcggtagaaacgctgatgaatgagaagctggtggaatatctattagaaaatccgactgacgcaaaaattgttgtcggtaaaattattgatgccgctcgtgcccgtgaagctgcgcgtaaagcacgtgagatgacgcgtcgtaaaggcgcactcgatttaggtggtttaccgggtaaattagcggactgctctgagcgtgatcctgctttttctgaactctacttagtggaaggggactctgcgggtggctcggcaaaacaagggcgtaaccgtaaaacgcaagcgattttaccgttaaaaggtaagatcttaaacgttgagaaagcgcgttttgataagatgctggcatctcaagaagtggcaacgcttatcacggcattaggttgtggtattggccgtgatgaatataacccagataaactgcgttatcacagcattattatcatgacggatgcggacgtcgatggttctcacattcgtacattattactgacgttcttctatcgccaaatgccagaaattatcgaacgtggtcatatctttattgctcagccacctctctataaagtgaaaaaagggaaacaagagcaatacattaaagatgatgatgcgatggatgaatatctgatgtctattgcgcttgatggtgcagcgctttacgtcagtgaacatgcccctgctatgcatggtgcacaattagaaaaactggttgttgactaccatgctgcgcataaaattattcgtcgtatggagcgtctctatccactgagtatgttaaatagcttggtctatcactcaacgctgacagaagatgatctctctgataaagcgaaagtggaagagtggatgagtggcttggtgaaccgtttaaataatgcggaagagcaaagcagtacttacagctataccatcacacaaaacgaagaaaatcgtttatttgagccagtattacgcattcgtacttacggtatcgatacagactataaattggattacgattttattcatagtagtgaatatcaacgtattactaatttgggcgatattattggtaacctgattgaagaaggggcctatattgagcgtggagaacgtcgtcaggcgatttcaagctttgaagaagccctagaatggttaaccaaagaatcacgtcgtggtcttgctgtacagcgttataaaggtcttggtgaaatgaacccagaacaattatgggaaaccaccatgaacccagatacgcgtcgtatgatgcaagtcactgtgaaagatgcgattgctaccgatgagttattcacaaccttaatgggtgatgctgttgaacctcgtcgtgcttttatcgaagaaaatgcactaaaagcagaaaatatcgatatctaataacgttttcttgagtcaaacaaaacccgctaattcaataggttagcgggttttttatatctatagtattcgttgtgttttaagctaagatcttcagcatacgacgaagtggctctgcggcaccccataacaactgatcacccactgtaaaggcagaaataaattcaggtcccatattcagtttacgaatacgtcctacaggggtacttaatgtgcccgttacggctgctggggttaattcgcgcattgttaattcacgatcgtttggcactacttttacccaatcattatgttgggcaagcaattgctcaatttcgttaaccggtaaatcttttttcagttttaaggtgaatgcttggctatgacaacgtaatgcacctatacgaacacaaagaccatccacaggaatgatatttgaaccggtgtttaagatcttgttggtttcagcttggcctttccactcttcacggctctggccattttccaattgtttatcaatccaaggaattaagctaccagccagtggaacaccaaattgctctgtcggcatagtaccactgcgagtaaagttagtgactttgcgctcaatatctaaaattgccgaagctggattttctagctctttaaccacttggttatgtaatgcacccatttgtgacaataattcacgcatatgacgcgcaccggcgccggatgcggcttggtaagtggagacactagcccactcaactaaatcgttagcaaaaagtccgcccaaagacatcaacattaagcttacggtgcaattcccccccacaaaggttttaatacctttattgaggctatcttggatatgttgaccattaacgggatcaagaataatcaccgcatcatcattcatgcgtagtgcagatgccgcatcaatccaataaccttgccaacccgcttgacgtagtttgggataaatatcatgggtgtaatcacccccttggcaactgataatgatatcgagtgaggcgagcgtatcaatatcataagcatcttgcagtgtactacgatgattgccataagcaggtgctgcttcacctaattgagaagtggtgaagaaaacagggtttatcccatcaaaatcacgttcttcaaccattctttgcattaaaacggagccgaccataccacgccagcccacaaaaccaacatttttcattgtaattaccctgtctttgtctgtaggaatagtgagagacttcacactaacctgacaaaatatagagagaggtgcaagtgaatttattgattatttaccaaagaattagaagtgtttctaatagtctgcatagagttaacaaaaggaaactacagaacgaacaaatatcacgaatttgttaaaaataatgcgccattaattaagtgaacattaagcataaatcatttataaaaaagattaagatgattccgttatgacttatttcatttttttgataaataaatttatattcttgtctaataaacaatgataaaaatagaaaaatgtaaaatagtgtaatatataagaaaaacgtatttacttagagatagctccaagctttatactgaaatccgtcattagtgagatgacataaattcataaataaaaaataacgatgaatgtacttcattttatctgatttttattttatctagataaaagctttagggggcgcaagatggatttatcaacctactttccattatcaacctattattcatatttaaagcggtttgtactgtctcctaccacaatgggaactattgcgccttcatcacgttggttatgttatgaaatgctcaataaattaaattggcaacaagatatccaaatcgccgaattaggtgcgggtactggggtgattacgcaacagatcttaaaacgtatgtcatcaaactcggtattagatgtttttgagatagagccagcattcgctaatgagctgaataagattaatgatccccgtttaaccatctatacagcgtcggctgaaaagttagatagtcattataatatgattatttctgggttgcctttcttgtctattaacagaaggttagggttaaaaatcttaaagcgggtacatagcgaattattaaaaacccaaggttgttttgtgttgtttcaatataccactcgatatgaaaaaacattatctcgttattttcatttagagaaaaaacgtgtgatgttaaatgtaccgccagcttgggtttattattgcacgccaaaaatagtgtaataacattacatcttaaattgtcattattgtgactctctatttttacgcaaatattgtgtatcaataaaagtatgtatcttattttttaatttaaatagtaagataaaaaagacgaaaaaatgtatctatagtctgataaatatcgaaatatcatgccgcaatgtcatgtaaagtcgcctaagtcatgattttgaaaaactcacctatcataattgggtgtataatcgttgatgttttttgagattaacagataaatagcaatttagggacttaaaatggcaatcgaccttggtcatctggtgacagaaagtcgcaatcatcacagtgaacatattgatacactttcaacacttgaaatgctaaaagtcattaataatgaagataaaaaagtgccttttgcggttgaagccacattaccccatattgcacggctggtggataaggtcgtaacagcattttctcaaggtggtcgattaatttattgcggtgcaggtacttctggtcgtttgggaattttagatgccagtgaatgtcctccaacctatggaaccccccatgatatggtgattggcttaattgccgggggacacaaagccattttacaagcggttgaaaatgcagaagataatgtccaattgggggcagaggatttacaccagcttaattttaatgctaaggatgtgctagttgggattgcagccagtggtcgaacgccttatgtgattggcgcattagaatatgcacgctcactaggtgcggtgaccggggcaattagttgtaatcctgatagtcccatagcgcaacgtgccgatattgctattacgccgattgtggggcctgaagtggtaactggctcatcacgtatgaaagcaggcacggcacaaaaactggtattaaatatgataaccacaggtgccatgataaagatgggtaaagtatttggtaatttaatggtagatgttgaagccactaatgccaaattaattgaacgccaaattcgtattgtgatgcaagcaacagagtgtgatcgagctactgctgaacaagcactagcacaatgccaacgtcattgtaaaacagcgattttgatgattttagccggcgtaaatgcacaacaagcaacacagttgttggcgcaaaataaagggtttattagacaagctctagctaaatgatagcgttacagatttgcttttaaacggaatgataaatgctatcttcgcattggtgagtgatccgtcgcaatgttaatcagcgaaaattcaatatgtcactaccttgtcatatttggtatgaaatattgaaaggggcctttattttatgtccatttttatagaaataagcgcaatatgaattgtccacttcctctaaaataagacagctataattagaatttctgtctgccccagccattacagaggttatgataaaaaagcccgttttactgaaactcaaatcgttaatattttaaaactcgctgattctggaatgaaagtggacgatatttgccgccaaaatgggatcagcaacgctacttattataattcgaaatcaaagtatggtggcatggaagctaatgatgttaaacgattaaaagaacttgaagatgagaacgcgaaaccgaaaaagttctttgccgaagttagtcttgaaaaccatgcaatgaaggagcttttcgcaaaaagggttggtagtggctgaaaaaagatcctgtgctcaatcattaaaagaggcaggtttatcagtcattaaggcctgtaagctgacgtcgttgtcacgagccacattttatcgtcagcaaatagattggcgtaaaaaagaccattggtgatagaaaaaatcccgaatattcaatgggtataggattttatgcacgacagtttatattgcggtaagcggttcagaaccctcaatattattgatgaggtaacgcgtgaatgcttggcgattgaggttgatacatcattaccggctaaacgtgttatcaggatgcttgaactaatctcgattaatttattgaattactgcgaaactcaccacgttgagctctcatattcaacccggcaagccaccgaaaaatggttttatcgaacgatttaatggctcatttcgccgcgaatttttaaatgtgtatttatttgaatcattaattcaggtacgagaaatggtgtggttttggtagcaagattataaccaaaatcgaacttacgaaagtttaaaccacctcccaccgaggtctatcgtaaacagttagaaaactctaagttggagtgtctcaattaaagggagagtggacaaccaaaagtggacgccgaaaaacgttgtccactttatggcgtattatgagtgaaagatattatgcttatggacaatgtgctccaactcatttcgctctattgttctaactcctgttaatctagcctcatcatatccatcaggtgtaaagtctgtcgtagttatacaaatcatttctttagcacctcttgtatttgcgaaactgtgaagcctttgaataggggtggaaccaattttactctttgtatacctcttgcactgcacaataaccaagtcaccatttttgttattacatctgacatcaacaccacggtcacctgctcgccctgaaacgacaacattggagtatccttctaactccagaattttagctacaaacacttcgaactcataaggatctaactctaataagttttgtatattgcttggtattttggggataggtcgtttagtgaagaattttcctccatctacaggctctgcataaagatttaaaagagaatggattgagtcttcaccatccttcaaaatatcttctaaaattgctctagttccattttctacgaattctgcaactttgagcaagaattgatcaaatgtaaatttgtcacgatttaacagaagttcttcaatcacatatgggatataaagtgagaccctttctatatatggtacattgaagatttcatctgaatatggactagttgccctcggaagatattgaccagctgtactttcttggcaaactctacgaaatgctctttcaactaaatgtctattttttggtaggtttaattcatgtagtcccagattatttaatttagaaaaaaagcttcttttccatgcctgttcgctaaaagatccagctaatttatcttgaagtgaaacagagcacctatatgctaactcgtctaagtcataatcgtttacataacatcgtctttcatcataagaaagctttatgaacgttagaatcaaatcactactaaaagcatagtgcgcactctgttgtattctcatagaaggatcgttattagaaagatctatcgtgagcaatggttcaaagccattctttctcgccagtaatttcaacctattgaagttagctatccattcatttgcaggaacgggcctaaagtaaagaactaggaatttagactcacctaatactgtataagcatgattaaatagttcacttatatcatcccaccactgctcatattctcttttttccggtctctctggggagttacttacaataacttctttagctaaacgcagttcatcaatttttaaatcataacctagccaagggtggtaaagttgtgctctttcaaagtatgcgcttccatcatgccatggaggatcggttatcactaagtcaatcgtttctggcttaatttttgataaaaactctctgtaatcagagtttccaaatttaatttttgagaagttatttaatgagtagccatatatagtattgatccgatttttaaattgtttctcaaatatgttgagtatgttcgtttctctcaactgtactttaggacaatgcaaatcctgacttttacttctgtaatctttatatttcatattgggaattacagataagaaggtacattttaaatactctttagaagcctcactacagtctaagttcaatatttcgttccaaagaatagttgatacgatttgacttcttttcggaaataaatttttgtaatccaaaaaatcttttcctaggtttatcctagagttttcgatgaatctaaaatcaaaaaaatctatgtccattttttcgatttcatccatcacactctgatcatattcgtcgaaaaacttctctttggcaccacaatttttacatttgaatttacccctaaaagttatattttctccattctttccaagtctttcatgatgtgtgatagttttataatttagtggcgttctgtcgtaacaaagagaatctatagttattttttcaccgcaactgcacatacttctgtagtagtattcagtttgtggtctagctatctttataagctgttcaaaggtggatattagttcatttttgtctggcaaattaaaaggtaactgaaccattttgtacgtatatggctcatactcgttggcatacacattccgattcattagcgaagccgcgtatgcaaagcttcctgacccagaaaacgggtcgcatactgtatcctcggcctctgttagtatatcaattacactttttgcgtggtttattgcttttcttccttgaaatggaaacaattgatctgcatgaggtggtttatgattaatatcagatagtgttaaaactagtctatctattttttctctgactgctttttgtttttcttttgaaaaaagccaatacatttatattatccttgatatgtctttttctattttttcatcaataccagtaacttcatttactagataaattttaataaattcagcaaacctatcgaagtatgttccttcagatagttgaattagagcatcatctaaagtgatttttctctgattctttaatttagaagcacttttcctacaaattacaattaagtctccatctaatgtttttcctggagatgtaacagctttcatggatctacgttgtttaggtatcgcgattacatcttcaaaaacgcaatttgattcgataattgaccgctttatagttttccagtgcttgatattcttgtctaaatagaaaaaagcaaagtaaccatcatcttttaatccttttaatatagatttaaaagaattcatcattcttatatcgtaatcattagagtcaatatttcgacctacagcatttgtttttacaatttcgaatttccataaatcttttgttcttgtttcatcaattattgaccaataaaaatcagaatattctaaataaggcgcatgatcagcatatggcggatctgtgattataagatcaacggtgctatcttcaagagcaatgtctattaatctatcagctggaacattaaatgtttcatgagtacattgggtttcggccaattccttttcggaccaatttaaaaaatcaataaaagctttatttcttttatttaaagcgactatcgggtttcttgatgtaagttcttttttaggtcgccagtaaggccattgtgaacttgcctttttatcacttaatcgtagtaaaggaagcatagaggataaaaaaatctttaagaaatttctttcactctcagtaaactctgtttttcgaatgtataagagacagtgattaataaatgacttatttctattagtaaaaaaatcagaagctttcacaccattatgaacagctattcttgtattttctacaaactcaatgcgttcaaagtctaaagggttagttatatttagttcatcatctttacatgagtatataatattgtcgcaaatgagaacctttccttttagattgttatttacgataggttttattttcacctcacaattaactaatctaaaatttccacctacatagctaccttcaacattgaaagactccctttcaacacataatccatctgtagttttatatatctctatagcataacttctccactcttcaaaagctgatgataatataccctttaaatgagtagatgaatctgtcgttgaaagtatggtacttactaataagttggatatagggctgagatcggatccgatagttcttctgtttaacttcaaggctgcgatcaatgatgtccctgatcccataaatggatctactactaaatctcctgggttacttaatttttcaactaataactcggttatattgattggttttcttgcccaataaggatggattaatcctgcgggataatcatgatttggcttagtcgccttcagtaaattttttaaatcttttaaatctttcattttgatattaggaataagtattctgttacgtttttatgtctcgcttgtccctgccccgtatgctgaagagaaaactctttaacttccatttgtaaccccttcttttttgtatactcaaagaaaaactgactatcaacaattgacgagcaagcatagctaatagctaacttagcgtttgcattcatacagatatcaatgagtttttcaaaggcttttttagctagagcttttttaccaaaatctgaagtaatacgatcttctctataacgaccaactgttgttgaacctatacgcttattaaaggtcagcattggatagtcatataaaacaaaagtatctaatacgtggtagtatcgagaatagtgctctttaaaatatggtggatcagcatatacaattgtttcggaatcaagagtaatttcatctagagcactcttaaattcttgttgtaaaactttagcttctgtcgtcaataaactggagtcaagtgctattaaccttttaattgtttcattaattattgagatagaacgtttttttattaagttgattgcagacttataactatgtggtttaagaaattgtgctagatgggttgtactcgacacgcaataagtcattgcagatgttacacaagccaatatgtgttttttgtcttcgggagcacaattttcagcaaactctctcaagaaatctatctccgcacactgataaattccaaagtaagtatttcggtagtaagccagaaataatgtccatttttcagagttctttagattctcgattgcttcggcatccccaccacaaagtaatgcactatctacgaacgttttataagattcccagttaaattgctcatgttcgatctggttgtagaaagagagctctgtaaagtattcaggaagataattttctcgatcacccgaaaatagagacttattagttaccttacttaattcactaattattgaagataaattaccactagtagggttgagtagtgaagagagaagtgtagctgagtaaggctgtatatcattagcagttactgcatagcctctatgctgagcttcaaacgctacgacgccggagccagcaaacaggtctatgaatttgttttgattaggaaagtacctaacgattgtatcaagaatattattgactattcttgattttccacccaaatattgcattgtcaaaggtctttgagcgacttgattatgcaacttagggatgttttcttcggttaacataagatacctgtatataaaaacagttattgaggttaagatacatcagaggatagtagaaatctatcgatacccactatttttttgtttggttatccagctatcaatgtcactttttctaaagcgccaactacctccgactttaaatcctggtaatttaccctctgctgtcaacctgtatgtagtcttttcagctagcttgagataatcagccagctctttaagtgtgagtatttcatcagacatagtaacccctcaattttctaggaagcgagaatatgagaaaattgaggagttaacaagaaaatagttcatattagttgaaactgaataaccggtatggtgtagaaagcactggctattgagatgcttttaaatcacgttgttaatgatcatgcaaaactccaccaaattaggaaggaaagatcgtgtaaaaatgatccacctgatagctctgctacatttcttgtttttgcaagggataatttggaatgcttcgtatggaaaccaaccatcaccaaagtctatgaaagtctggacttcggctgacaattagttttttctagttgtagccggaggtcagatatgatgaatattaaagctaaacgagatattgcacataaaacaaaaatcttaaatcatgcccgcgagagcaaaaatattgctaaaacttgtcgtcattttgggatcagtagagaaactttttatacttggaaaagagcttatgaacgagatggcgaaaaaggattaatcaacaataaaccctgtcctgaaaatccaaccagaagagttgcaaaacatatcgaagagctggttatttatctgcgtaatctgcgtaatctgcgtaatctgcgtaatctgcgtaatctgcgtaatctgcgtaatctgcgtaatctgcgtaatctgcgtaatctgcgtaatctgcgtacgacttaccattttggcccccagcgcatcgcttggtatcttctgcggtttcataacatcaaaatatcacgctctggctgctactatgtattactaagaaacaaattaaaccaacttccccaaaatcagcgaagtcgctctaaaccactatttaaacgttatcagaaacaagtgcccgggcaccatgttcaagttgatgtgaagttcctattttttaatacgccagatggtcaacgaattaaacgttttcaatatacggcgattgatgatgcgacacggatcagagcacttaaaatttatgaaaagcacaatcaggctaatgccattgattttattaattatgttgtaaataaatttccctttagaatcaaaatgattagaacggataatggtcacgaattccaatcaaaatttaattggcatattcatgatctcgggatggagcatgtttatatcaagcctgcaacccccagattgaatggaaaggtagagcgttctcatttaacagataaacaagagttttatcaattaatcgattataaggatgatgtcgatttacatgaaaaattagctgaatgggaggctttttataattgtcatcgccctcactcagcgcatgctggtaaaacaccatatgaagtgttaaaaaataagcttggtctttaagactaaacgtcagccgaggttctgagtgacacaatcagctaaccacatgaacaaatgagtttaatcattacaaagaagctagaattctcagaatgggtaaaattatttacgtatataaagatgacaaacgccttattagatcgattagtccatcactgccacatccttgaaacgagtaacgaatcttatcgttttaaataccgagattaagattattttttagatattaggcggtggattttttgaagatcattgacagatacatcatcaacagtacgaaattgaggtaattgatttcgctttttttcagcaatagggtcaataccttttctaataccagctcttagttgtaaggtttgtagttttgcatcgctaaggggccgcccttcaggcactcttccatatctgccaagtgttagctcttctctttccattaatggtatagcgaagaacccggaaagcgctacctttcttggttattcgaaagtaaagaccagtatctactttatactttccaacctttccttctctcaacttgtcttttaattgtgcatcattcataagcgtaaaaatggtgacagataagaagtaacgtatcattactttgttcgcctgccaccatttagatgatatcttgtcaccgttcttgaaatcttatgcaatttaattgctgataaaccctctttataagcagtaattttgagttcttctagtgtcttgtagaatgttactcaatattctggatctgctctcgcatctgttcaattaatacttttaattcaatagcggaattggtgacatccgtattaattgatttggatgctagtgtattggattcacggttaaactcctgcatcataaaatcaaggcgacggccgacagcctcttttttactgagaattttgcgtgtttctttaacgtgggcatctaatctatcaagctcttcagcgacatctaagcgttgcgctaacatcactaattcttgctctaaacgattattatcaacttgaacttgtgcttcttctaatttgctggttaagcgctcacgttgccattggagaatttctggcatctgtgctcttacttttacgacctcagcacttacggcatctaaacgttgctcaatcagcgttttgagtgcttggccttcagcttctcgacttgcaataaaggcatcgatagctacatcaagctctgctaatagttcgctaccaatggcatctaaatcttgctcttgggctgagataaccccaggccaacgtaaaatatcaaatgggctgatagtaccttcatgactttggctttttacccagttagcagaaacaatcagttgccttgctaaattttcatccaaagtcagttcaccttgtgagtgagcattgagttcaaaacgcaagttacattctattttaccgcgtgttaagcgattacgtagacgttcacgaataacaggctctaaactacgtaattgctcaggtaaacggatatatgtttcaaggtaacgttgattaacggaacgcagttcccatgcggcgctaccccactcttttttgatatctcgacgagcgaaagcggtcatactacggatcataatagggtctcaatattgtaaatgatgtaacgattataaccctaggtatcaacacaaggataggcataagccgttttaggtcgtataatgcgcccccaatatgtcagagaaagcggagataacaccatgcgtccagcagacagacaagcagaccaagtacgtccgattaccattactcgccactatacaaaacatgctgaaggttctgtattagttgaatttggtgataccaaagtcttgtgtaatgccactgtagaagagggtgtacctcgttttcttaaaggacaagggcaaggctgggtgactgcagaatatggtatgcttcctcgcgccactaacagtcgtaatgctcgtgaagccgctcgcggtaaacaaactggccgcacaatggaaatccaacgtttaatcgctcgctcactacgcgccgcagtggatttaaaggccttgggtgaatttactatcacggttgattgtgatgttattcaagccgatggggggactcgcaccgcctctatttctggtgcttgtgtcgcgttagtggatgctttaaataaaatggttacagaaggtaagctgaaaaagagccctcttaaatcaatggtagccgctgtttctgtgggtatcgttgatggtcaaccattatgcgatttggaatatgttgaagattccgcagccgaaacggatatgaatgtggtgatgatcgatgatggccgtatgattgaagtacagggtacggcagaaggtgcaccatttagtcatgaagagttacttgctttactcgcccttgcgaaagggggattagaaaagatatttgaagcgcaaaaagaggcgctaaagcaatagattctattttttaaggcgactgaaaagtcgctttttttatgtctaaaatctgtcattaagcaatcttaataggagaaaaaaatgaaagcctaccagcgccactttatcgaacttgcattagcaaaaaatgtattaaaatttggtgagtttacgctgaaatcaggtcgtgttagtccttatttttttaatgcaggtttatttaatactgggcgtgacttggctttattgggacagttttatgcacaaacattaatagataatcatgtgccttgtgatgtgctgtttggaccggcttataaaggtattcccatcgcgacaacgaccgcagtggccttagttgaacatcatgatatggatgttccttactgctttaatcgtaaagaagctaaagatcatggtgaaggagggacattagtcggcagtccattaacagggaatgtggtgattgttgatgatgttattaccgctggaacggctattcgtgaatcgatggaaataatcaaacaacatgatgcgacgctgtcaggggtattgcttagtttagatagacaagaaaaagggcgtggttcgctttctgcaatacaagaattagagcgcgattatcaatgccaagtttattcaattattactttggatgatttaattagctacttaactgaaagtgagacattatcggcacatttgccagcagtaaaagcctatcgtgaacgttatggcattaattaaaaaagcaaaaatacaataaaatcgctcaatagctgtaaaaaaaagccctcgcccaataatgggcggggtgagtagtacaatgaattttctgcgataattatcacagatattgaaagataaaaaggacttttacagtagggacaaggcgcgttgccactgtcacagattggggatcgcttagtgccattcccagtaaatctatttagatactctgatatcaatagagcgcatgttaacacaaataagaaaaaaacggcatatatgtcattttcaaattattgagttaagtcacgagtccactctttcattgttacttgctcactgtaattgtgcctgaattaatggccaacgtgcttcaaattcctgtgtaggatgataacgaaattccgtacgtacaaaacgtgctagcataccttcacaaaacgcaagcagttgtgaagcgagtaatgcttcatcatgtaaaaaggcacttccttcgcgaattttacgctctttaatcacttggcgaagttgtacttcaattcgctcatacaattggttaatgcgcccttgtaatctatcttgctcaaacattaatgcgtgtccggtaagaatgcgagatagcccagggtttttctctgcaaagccaaggatcaagataagaataaggcgaatgcgcgcgatagtttctttctcatcttttaaaatcaggttgatacgcgaaactaagctatcttcgataaactcaattaggctatcaaacatctttgttttactggggaaatgtcgataaagtgctgcttcagataccccaacggtagccgctaatttggctgtagtaatacgttgactaccatcactagactccaacatttgagcgagcgattgtagtatttcatcccgtctatttctgcgtttctttttggtttctttttcttctgccatgactgataaggcccctgctaaaagcaaaacaaatcagtaaacctttgcactaaataaaaacgttagtgcaaagggagtgatatcgtcattgatattaaaataaatgcaagacgtcgtgcttattggcgaccagagtgtccaaaaccgcctgtaccacgctctgttgccgtaaaatcttctacaatattaaattctgcttgaacaacaggtacgataaccatctgggcaatacgttcgccgggttcaatagtgaacgcttgttgaccacgattccataccgataccatcagttgaccttgataatcagagtcaattaatcccactaagttaccgagtaccaccccatgtttatggcctaggcctgagcgaggaagcaccattgccgctaacccttcatcagcaatatgtacagcaagacctgtaggtaacagctcagtttgtcctggtgctaataccagtggagcatcaaggcaagcacgtaaatctaaaccagcagagcctgttgttgcatacgcagggagtggatactcttgtccaattcgtggatcaaggattttaacgtcaatttttttcatcataatgtttggctatctcgtcaagtaggcgatgactcagttgcgttttactactatgtggtaaacgcgtttctccatttgcccagataaggtgtaatgcgttgttatcactattaaaaccagcatcttttagtgatacatcattagcacagattaaatcgagttgtttttgttctcgtttacggcgggcatattcttccacattctgggtttcggctgcaaatccgacaacaaatgggcgatgctcaaccatttttccgacactggcaacaatatcggggttttttatcatagttatcgttacttcatcaccttgttttttaattttttcaggggcaacctgtttggctcgataatcggcaacggcagcacaaccaataaaaatatcttgggatggcgcaatattcatcacttgttgatacatctcttgggcactttcgacgtcgatacgtttaacacaagcaggtgtcggcaatgtgacagggccggcaatgagtgtcacttctgctccccgttgagcggccgcttgcgcaatagcaaagcccatttttcctgagctatggttgctgataaagcgtactggatctaaggcttcacgtgttgggcctgcggtaatggtaatttttttacctttaaaatcgtgttgaattgcaaattgttgctctgctaatgccaccaattcaagaggatctaacattctaccgggtccaacatcaccacaggcttggctaccagagtcaggcccccagataagacaacctcgttgtgccaaagccgttaaattttcttgtgtaatcgtcgcacgatacatttgttgattcatcgctggggcaatcgcaataggtgctgcactggctaaacagagtgtggttaacagatcgtttgccatccccatgcgtaaacgagcaattaaatctgcggtagcaggggctaataaaatcagatcagcccatttccctagttcgatatgtcccattgcggcttctgcggcaggatcaagcaaatcatccgcaacagggaagcctgataccgcttgtagcgataacggggtgacaaaggcatgtgctgcaggcgtcataacgacgcgcacaatagcgcctttatcacgtaaacgacggactagctcaggcgctttataggccgcaataccaccactgatacccagaataatctttttgtcgtgaagtgtagtcatgatgaaatgcctaattgcataaataaatgtccataattttaccacaagctaagccagagttaggcattctatgtaatacgatgttttataaaataaattattgtgtattacctcgcacaaattttatctgtggctttttcattcaacttgtacagtttatagtaagttaactgtatataaaaacagttgttttgtgataaatattgcatgaaagataaaattaaataattgaaagataaaataacaacataggccaattataacgtattgatgtttaaatgcttggcgaaaagggagagcacaaagaatggaaaacgcaaccatagagacactcttaccgagagaaaaactgctgttgcatggtgtagaatcgttaacggatgcagagttattggccatttttttacgtacaggcacctatgaaaaatcggtattagaattagccgactttttacttagaaagtgtggttctctctatcatgtgatcaatgcggattatgaaacattaggctgttttaaggggataggcgtgggtaaatttacccaattacaagccattaatgagatggctcaacgctttattaaaacaaagtttatgcataaaaatatcctctcctcatccgcagaaaccaaaagttatttgcaaaaacgacttaattggcgtgatagagaagtatttgtcgtgctatttttagataaccaaaaccaaatgatcgattgtgaggaaatgtttaaaggaacggtggatcgtgttgaagttcaccccagagaaattattcgccagtcgattaaaaagaacgcagcatcgattattttagcccataaccatccttcaggtctgtctgagccaagtcttgccgataagcagataacagaaaaaatttttacagcctgtcaattagtcggtataaaagtgcttgatcaccttgtggtagggcatgataactgtgtttcttttgctgaacggggttggttatagccaatattttttaaaattattgacaatctttattgtacgggtcttgagcgttgaggccattgggcgtatactacgccacctttgaggatcttgggtttggcgagaagagcctatctcagcaagttttttctgaggtgtttacacagtttttcaatcgttaaaagttgctgagatgggctccaaagcctgacgaggcggtcaaacctgatactaaagctcgagctgattagatttttggagaatagacatgtcccgagtctgccaagttaccggcaagcgtcctgtgagtggaaacaaccgctctcacgcattaaacgcgactaaacgccgttttctgccaaacctgcactctcaccgtttctgggttgagtctgagaaacgtttcgtaactctgcgtgtatctgctaaaggtatgcgtgtgatcgataagaaaggcatcgaatctgtattagcagatttacgtgcccgtggtgagaagtactaaggagctgaaaaatggctaaaggtattcgcgagaaaattaaactcgtttcttctgctggtacaggtcacttctataccactacgaagaacaaacgcactatgccagaaaaactggaaatgaaaaaattcgatccagttgttcgtcagcatgtgacttataaagaagctaaaattaaataattttagttctctgaaaaaaaacccgaccttagcgtcgggttttttgttatctggcttgcgctaagtataacaaagtaaagctattatgatctttattgactctttcgttatactagtgccctttttatctatcgagtgaatagttgcagatgagtaaatcggtgttatctatcttacatacagagtcgtcttgtggttggggtggtcaagaaatccgcattttgacagaatctcaaggcatggtgcaaagagggcaccatgtgacactggtttgctgtccaaactcaaaaattgccaaagcagcccctgactatggtattgaggttgtcacattaccgattgaaaaaaaacgcggatctgcactgatggcattgcgtaattggttaaaagtccatcgtcagcaatttgatgtgattaatacccatagctcgacagatgcttggttagttgcgctatcttgtgcttcattacgccactctcccgccatagtacgtactcgccatgtatctaccgatgtatcacgttcactgcccacgcgttggctctatctgtcttcaagtgcccatattgtcactactggtgaaaaattacgccaaaccttacatcaatataatcgttttccgcttagtcaaatgacctcagttcctacggggatcgatttagaaaaattctcgccacaaaataaacagcaagcacgagaaaaaataggtgtgcctaataaacctacattagggattgtggcaacaatgcgggtatggaaaggacataaatacctaatagaagcatggaaaacattgcatctgcaatttcctgactggcaactacttctcgtcggagatggcccacaacgtaaaaatttacaaccaatggttaaacttgcagggttagaagagagcgtctttttcttaggcaaccgcaatgatgtaccggattgcttaaatgcaatggatttatttgccttaccctcttttggtaacgaaggggtgccacaaggtattatgcaagcgatggcttgcggattaccggtggtatcaaccacagtaggtgcaattagtgaagcggtgattgatggtaaaactggttttacattggcacctcaagtacaagaaaccctaatcaattaccttgctaaattaatggcctctgatgagttacgtcaacaaatggggcaagcgtcattagcccatgccaaagctcagtttggtttagataacatgctagataaaatggaaaaaatatttattaacgccattagccttaaagataaatcacgataattgatatcctataaagtcgctaagggctaattatcctgtatctgatgttatattttcattctgtttatgaatatttgtaatgctttttagtgtatagtctggaaagtaaatgtatcatttaaactaaataaaaagtgtatggatccaaaaaacatattggttatcgcaattgcgcgttttggtgatacgttactgatcacgccggtgatccacgcactaaaagagcgttggccgaatgcccgtattcatgtattggcgcataaacgcagtgcctgcatcttgcagcacaatcctgatatttttagtgttaagcctttctcgaaaaagcgcgcccgttggcgaggatggttaccccataaaccttatgatttagctttggtatatggaaatgatcattcattagtgcagtatgcccgccgtcaatcacaacatgtagtggcttttgctgaaaataaccaaaagcaatcagacataacatgggtggcttaccctaaagagttaatggtggcacaaaaagagcgtgctttattaattaatgcgttaggaatttacccaaccaattggcaattacgctactctattagttcagaagaaaagcaatttgcccaacagtttatagagagtaatgcattaattaataagcacattattggcttacaattacaaagttttcctgccaaagcttaccgagattggcctatagaacactttttgcagttagccaaacagataatgactcatgacgagcaggcctattttctgttattaggtgggaaagagagccaacaagtcgccattgagctggcgaaaaaaataggtactgagcattgtttggcattagcagggcaagtctctatgcgcgaaaatgctgccattatggcgcatttgtcgctctatatcggggttgatacagggccgacgcatttagctggcgcgttaggtattccgatggtagctatgtatcacagttatcatcccggatgttatttagcgccattacaacattcatgttgtcatattatccaacatcctattgcgttagccgatgcaagtcgtgaagatagtatgtctgatatttctgtcgccaatgtttggcatgccgttagcgatattttaaatggaataaaggtgaaacagtaactcatgaagattggcttaattgatgtcacaatcacaatgtcttatggtgggatccaaaccgcagtatgggagcttgccaaacagttacatgatgcgggacatgaggtacatctttatgggggcaatggtgatgtcaggcatgaactagcaggccgacaaattcatattcatacctatccttatacaccaagagagaaagttatcgatctcggtggtcgttttcgtcgtattgttgaacgttatagttttgctcgctatgctaaacaagatgttattcgacaaaattttgattgggttattttaactaagccgtttgatttcttttggcctgcaatgatgcccaaatcttgctcgacacgtttttgttatatgagtggtggcaccagcttttttaaaggcgatcgtaaactggcgaaaaaaatctctgcctgggttgcgtgtagccattttaatgcttggcaaattcagcaacattttaaacaatttcctgcggttatctataatggtgttgatatggcaaagtttaagcctatgacaacatctttgcgccaacagctcggggtgagtgatcctacgtttttattggcatttgcggggcgtgtagtcggttggaaaggcttaagtgttgctattgatgcaatagcccaattgcgagatgaagacgttaagttactgatcatcggcgcgggtgatgcgctggaacaattaaaaaataaagcgatggtaaaaggtgttgctgaacaagttatttttcatcaacctgttgagcatgcaatgttacctgagttttatgccgcttgtgatgcaggggttttcccgagtatcggcgatgaagcatttgggatcaccattgcagaagcaatggcatgcggaaaaccggtgattgccagctatatcggcggtattcctgaggtggtaggcaatgagcaaagtgcaggattattggtaaccccaggtgatgtaaccgcgatggtgaaagccatcaaccatcttcgggcattgccggatagaggtaaagcaatgggtgaaaatgcacgccaacgcattgcttctcactatacttggcaacattcagcacaacgattactacaggcattaaaaacagaatgatgaaaatcgcctatcttgatccttatcccgttcccgatttgcgtgtggcttcattgcaaatattgcaaaacgttgatgcgtttgcccgtgccggtgcacaagtgacgctagtcacccccaaaggacagtatcgagatagcgatattctcgggcgtgatattcatagcaatgcgcagttaattgcgctaagagatatcagacgtaaatggtattttccctttaattcgcaaaagctattttcattacaaattgcacgttggttaaaacaacaccctgttgatgcactatttacgcgtaatttaaaactggcctgctatctggctgagaaccatgcagatattccgctttttttcgaaagccatgagatttttgcgcaatcttttgcagagtcgcactcttttgaaacgaaaaaaaatcgcctgaaataccataaactgctaaaaatggagaagttggtatacagtcgcgcaacggcagtatttgtgctgacctcgctgttaagggacgatattatttcgcaatatcaagtaaccacgcctattactattgtacccgatggggtggatttatatgccgcagatagcaacaaagatagccatagagatataaccgctacgaccaataatgtaacagaggtactttatctaggtagtttgcataaatggaaagggatccccaccatgatgcgagcgatgaaatatctggataacgctagactgaatattgctggtggaacggctgagcaaattaaagggctacaattgcttgctaaggagatggatgtaaaagagaaagttaactttcttggttttatcgatcctaaacaacgctttcaggcgattgctcgacatgatatttgtgtgttgcctttaaccttaaccagtatcggtagtcgctacacctctccgttaaaactgtttgaatatatggcgatgagaaaaccggtggttatttcagattttccatcaattcgtgatgtggtggatgaaaaagcggtaagttttgctgatagtggtgatgcgcagagttttgcccaacaaattaaattactaagagaagagccacaacgtaccagtgagaaaatcaatcacgcccgctcattagttgaaaattattacaactgggataaacgggcagagacgattttacataccatcaataaactgattagctaacggatgtatcttcttgggtcggtgttgctgagggctgatttaataatgaatagcgcaatgctaacattaaccctaataaaatacccacttgattaatataggcattttcaaataatccacgtagtacataaacccctaaaaacgacattaataacaccagcgctgcttggcgagtaatcccctgatttttgcggatcaattgaataccctgagcgataaaagacgcgcaaaaatagagtagacttattaaccccaaaataccgccggcaaaccagaaagctaaaaatacattatggggaccaatggattttttaaatacccagtttttatgctgttttacttgctgattataaacattatggtaaagctgattaccataaccatagcctttaataggttgtgctaagatcaaatctaaggctgaaccttgggtaccaccatcaaatcttagtccgctattggtttgcgatagtttatgtttaagtttggcgttaataaattggttattaggtaattgtgttacaccgaaaaagagcgcaacgcagatacccatgctgagtaaagtaaatatccactggcgattaatgattaagataagtaatgtactaatcgctaatgcgacccaagccccgcgtgctaatgtccctaaaattgcaaataaaaataataggctaaccacacttaataaaagccaattaattatcgaatgattttttttcaatgcccataaggccaatataataggaaagaaaaatagtagtgcataagagatttctctatgcgctaattgacttttttttgtaaaaggcaaaatattttgctgatattccaaataatactgcgccaactcctttgccataatcaccaataaccccatggcgaatgacaccatcaccatctttgcaattgccgtaggtgtttctttatacaatacaatgggaaacgcaatggcaaagagcagtaagccatttaaaatcggcttattaatctcttttagactcagtgcgggctctacggaaatcacgactgaatagccaatggcgagcaataagaaaaacagcgcataggcgagattatttttaaaaatctgaccaatagtgcgaaaatcacgcaccagataccaaagtgccgttgcaccaatcaaccccatcactatatttttatagcgagtgatatcgggtaagtagatcaatataatgtaaagtccaataatggataaattccacaaagattttttactatcgtctttaaacaacatcataataagctgccactgtcctttatgttatattgctctagcggtttgtggggatgaatggctcatcatacaataaaaatgatgttatcgctgtatttctcaagtgacaataatggagtgacttgtgccagaattaccagaagttgaaaccagtcgccgaggtattgagcctcatttagtgggcaatatcttacactacgcaatagtgcgtaacagtaaattacgttggcctgtttctgaaaaaatcaaaaccttgctggatgaaccgattttaagtgttaaacggcgcgctaaatatctgttaattgaattaaatcaagggtggatcattgttcatttaggcatgtccggcagtgtacgtatcttgccagaagagcagcctgaagagaaacacgatcatattgatttagtgtttcgtgatggcaaggtactacgctataccgatccgcgtcgtttcggtgcatggctatggtgtgaagatctagccaccagctccgtattagcccatttagggccagagccgctttcggcgcaatttaacgcgcaatatttatatcaacaaagcaaaaataaaaaaatcgccatcaaaccatggctaatggataacaagctggtggtgggtgttggcaatatttatgcgaacgaagcactcttttcatcagggatcatgccagatagaaaagccagtagcttaaccgagcaagagtgtgacgtattggttaatgccattaaaacggtattaactcgctcgatagagcaagggggaaccaccttaaaagattttctacaatctgatggtaaaccaggttattttgcccaagagctatttgtctacgggcgcaaagataaagcgtgcttaatttgtggtcatactattgaaagtattaagcaggggcaacgtagcactttcttttgccgacattgccaacatggtgaaataaccgattaacgcttaccgagtttttgtagcattgctgtagcaaccacttcaggtaaaaaagtcgatacatcgccgtcatgacgcgccacatctttgatcagtgaagaagaaacaaaagagagattttgtgaaggtaacaaaaagacactatcgagatctggggcaaaatgacggttcatattcgccagttgccactcatattcaaaatcagaaaccgagcgtacgccacggatcaaaatggtcgcttgctgttttttagcaaaattcgccattagctcacaaaagccgacaacttccacattcggcaggtgttgggtgacttcttttgctaaagcgacacgctcttctaaactaaacatagggtttttacgggcgctggcagcaatggctaataacaccgtgtcaaacatacccgcagcacgagtgagaatatcaatatgcccataggtgatgggatcaaaggttccagggtagatagctttatttttcatattcacggtttttccggctaagttcccataatgaggcgtatttattaaaggtatactgtgcattaacaaatgccaatattaatccctgttttccatctaaaatacccattctcagtaaccaagttttaaaaaacgcccccagtgtatggctaataatagcgctataacgggtagttttaccctgctgattgcgctcttgtgcccatgctttagcgtattttagctgtttttgttggaactcgattaaatcacgacaagtaagatgcagcagatcccctggtaaagttttaatggttgcaccttgggtttctaatgattcatgaaccaaattatcattatattgatactgttcacgagcataaaggcgggttactttatcgggataccaaccactatgtttcataaaacggcccataaacaggttacggcgagcacaattataaaccacacccggttcaggttgttgtaacacggcttgaatactggcttttaactcaggggtaatacgctcatcactatcaatcataaaaatataatcgcctgtggcgtattgctgtgctaattgtcgctgtttaccaaaccccggccatggagtattgctaaatactttagcccctttttcacgggccaattggcaagttgcatcgtcgctccctgagtctaaaacaataatttcatcagcccattgtaccgagtctaaacatgcttcaataacatccgcaacgtttttactgatcatcacgaccgagaggcgtttactttcactcattagtgactccgtggtggcagatagggagagagtaaggttaataagcgcaataacgccccttgattctcatgaagtacctcaacggcatggtgtccataatagcggcgataatcttcatcattgagtaatgaggcgattgccgtcgccatagagtcactatcagtgacggtaattagcccttcagcttggtctaacttggcacagatatttttaaaattaaaagtataaggccccattaagaccggaatagcatgagctgcggcttctaatgggttatgtccaccgcgctcgactaaactgcctccaacaaaggccagatcagcaataccatatagcaacattaactcccccatagtatcgcctatcaccacttgggtttgtgcatcaggaatagcatcgctactgcgtagggtatatttaaagccggcctcttgggtaagttgctctgcttttgcaaaacgctcaggatggcggggaactaaaatcagcaacagttgaggaaattgtgccagtaattttttatgggtatctaagacaatcgcctcttccccttcatgggtactggtggctatccagacagggcgatgtgctgcccactggcggcgtaatgccactgctttagcggcgagctcaggggtgaccgagatatcaaactttaagctaccggtaatatgcagatgtgagcgttttagccctaaagcaataaaacgttcgccatcttcctgattttgggcagcaattaaggtaatttttctcagcatcgttttgacaaaactacctagtttttgataacccactgctgagcgctctgataagcgagcattagcaataatcaatgggattttgcgacgataaagctgtgagataagatttggccacagctctgtttccatgatgatcaccaatttaggatcaaccgttgtaagaaaacgattaactgagccgggtaaatcataaggaaggtagacatggtacacatcgtcaccaaatgcagagcgtacgcgctctgagcctgttggtgtcatggtggtgacggtaataggtaaatcgggataatggtggcgtaatgcacgaacaagaggtacagcggcaagtgtttcacccactgaaacggagtgcaataaaatgccatgaggcgcgactttgtctcgacaaaagccatagcgctcaccccaccgtttgcgataggcgggtgctttgcggctgcgtaataaaagacgtagccaaatcagaggttgaataaggtaaagaagtacctgatataaacgcaacaacatgctatcaaattcacttatctggacgaaagcctatagtaccacactgtgtaggagaaagtgtgtaaaaacaaatgatatgatgatagaccacgttatttatcatttaacggctttttggtgtactaaaaacagattattcagattatttaagaaattagtgaggaaattttttataatcaaataatagaacggatcaatagggtgcttttggagcgttatgagtaaaaaaatgacattaatacaacgggttctaattataaaactacgccatcatggtgatacgttgttaattacccctgttattaatacgctaaaagcgaattatccaaatgtggaggttgatgttttaattaacaaagaaaccgcacccatgattgagaatttctctgctattgaaaatattttttccttagacaaggcttggaaaaaagagggtaaattagctcggtttcgccatgagtggcggttagttaatcagttaagacatcgacaatatgatgtggtgattaatttagctgatcagtggaatagtgcgcttattacccgctttacaggcgcaaaagtccgtatcggctatgatatttataaacgacaaagtcctgtttggaaaaagtgttttagtgatttaatcccattaggctcagttgataatcgacatattgttgaacaaaatttagcactactacaaccgctgtcattgcaacaaatagatacgcaagtatccatgacatacagccatcaagacaaacaggctgtgatggaaaaattaaaagcttatggtgtattaaccccttatattgtgatccagccgacgtctcggtggttctttaaatgttgggatgagcataaatggtctgaattaatagatactctacaacaacagggacatcaaattgttttaacatcaggaccagactcccgagaaaaagagatggttgataccattattcaaggatgtaagacaaatgatagcgtctctttatcagggcagttatctttaccgcaacttggtgcattgattgataatgctgagttattcattggagttgattcagtaccaatgcatatggcttcagcactaaaaacgccactggtggcactgtttggtccatcaaaattatttcattggtcgccatggcaacatattggcgaagttttatgggcgggaaattatggagaactcccagatcctgatgatgtacataccaacacgcaaacgcgttatttaagtttaattcctgttaaagatgtacttgaagccgtaaggagacaattaaaatgaatacattccgcttggcgatagtacgtcaaaaatatcgaccagacggtggcgctgagcgttttgtttctcgcgcactggaagcgttagataatcaatccgtagagttgaatgtgattacacgctcttggattggcgcggtgcaaccacaatggcatattcatattgttaacccttttaaatggggacggattagccgtgaaaaagggtttgcacaagcagcaagacactgttggcaacaagaaaagtttgatttagtacaaagccatgaacgtattgctggttgtgatatttaccgcgcaggagatggtgtacatcgccgttggttactgcaacgctctcgggttttatcacccttacgaagtaaattactgctaaatagttgttatcatcgttatgtaatgaacgcagaaaaagagatgtatcaatctcctgagctaaaacgggtgatttgcaattcagaaatggtcaaacgtgaggtgatggaagattttggcgttgaaagtgaacgtattagtgtgatttataatgcgattgatcatcagcgttttttccctgccacggctctttatcggcaacaattacgtcagcaatatcatattccggttgagggtaagtgttttatttatgtcggctcagggtttgaacgtaaagggttaagagctgctattgaggcgattagtcatactaatgcttacctgatggtgattggtcaagacaaagagtacaagaaataccaacaattagctcatcgattaaactgtcatcaaaggatcttatttttaggtgtacagaaagacaccttacctttctatcaaatggctgatggactattgttacccactctgtatgatccttttcctaatgttattttagaagctatggcatgtggattaccggtgatcaccagtgatacatgtggtggagcagaatttattgaacaaggtctaaatggatttgtcacagatgcattagatatacccgcaatgatcggtgcaatagagagtattccggccgataacttaggtaataagatgtctaaggctgcacgaaataagatactaccctatacgcctgagaatttgtctcaacaactgatcgagctttaccaaaaggttcttagcctatgaaggaacatatactttttattattgatggattaccgggtggtggcgctgaaaatgtcacgatcaggctttgtcatggcttaagtcaacgtggttatcaagttacattactctcattagcagaaaaatgtgactatgccattcctgcagatattgaactattaattgatgcagatagttaccatggcttattttatcgacaaacagaattaaaacgacgtgccaactcgatggataagacccttcaggcattgtttgcgcgcaaaggcattcctgcgttaattgtctctaacttacataagactgacagaattgttgcactatcaaaacaactggcagataagaatgtatggtattgtattcacggtattttttcacagtcttatttaggcaataaaaaaggtttttcccgctggttaaaacagaagaaaattcaaaaagtctatcagggtaaaaatattattacggtatcaaatgcggcaggacaagatttaatagagaacattaaaattgtccctaatcaattaaaaacaatttataacccatttgatattcaagaaatcagaacattggcatcagaaaataatccctaccaaaagcaggattatttattgcatattggtcgttttcatcaagtaaagcgccatgaccgcttattagaagcgtttgctttagccaatctaccttgtaaattattgattgcaggacagggatcttctgaggtcaccagcaatattaaaaataaaattgttgcactaaatttagaaaataaagtgagcttaattggctttttagccaatccattccctgtgatcaaagatgctaaagcggtggtattaagctctgatagtgaaggcttaggaaatgttttagtcgaatcacttatttgtaatacccctatagtaagtactaattgccttggtgggatcagtgaaattatggagggtgaattagcagattataagtctgaattaaattcagcatccttggctgaaaaaatgcgtttagcttactttaacccgcctaaaattacgcctaatatgtatcaaaaatttgatattgatgaagtgatccgtcagtatatttcattaatttagctatcttattctcaaagaggacttaggtatttttcaatgaaaaaaccagcatttattatcacattagataccgaaggcgataatctttgggaaaatgagcataatattactacgcaaaatacgcattttttaccccgttttcagcaactttgcgaacgttttcaatttaaacccgtttggctaaccaactatgaaatggcaatagatgaagcctatattgagtttgcacaagatgtgatagcccgtaacactggggaaattggtatgcaccttcatgcatggaatagtcccccaattgttgcgttaacggacaatgatctccattatcagccttatttaattgaataccccaaatcgcagatgcgcgataaaattgcctttatgactgacttactggaaaataaactacaaacaaaaatgttaagtcaccgtgctgggcgttgggcatttaatgaaacttatgcgcagctattgattgaatttggttatcaagtcgattgctcagtcacaccaaaagtcgattggcgttttactaaaggtgatccggcacaatcaggcggtacagattacagtaatttcccaagccatgcgtactttatggatgttaatgatatcagcaaagcagggaattcaacgttacttgaagtgccaatgagtattcaatataaacattccccttttatgaataaaattaagcgagggtacgataggctaagaggtaaacgacgctcaccttcagttaattggttacgccctaaagggggaaatgcccaacagatgattgaagtggcacaaaaatctttagcccaaggtcactctcatattgaatttatgttgcactcttcagagtttatgcctggtggaagccctacttttagaacagaacaagatattgatggcttatataatgatttagaaacactatttaatttcttacaagataaagtacagggaatgacattggctgagtattatcaaaataaagtgcaggcaaaataagatgaagttaaagaaattaaaatgggtgcactattttctaaatctctataacccactctttggtaagatgaaaaaaacggcaacattttcatctgatatcaaatttaacagtattgttattttttcaaccacagcgctgggggattttatgtttaataccccagccatcagagcaattcgtgcacattatcctgatgcacatatcacactggtttctagtgtaaaaaataagttgttagtggaaaactatgagcaaatagatagtgtggtgtattgggataataagatcagaaacttgttaccggtggctttacaagttaaaaagtataaacctgagttagcgattattttacattcccatcttccttatgacgtattatttgccgtgatggcaggttgccaatatattttacgcaatacttatgatgttattccagcctggtttagaaagtggcttgtggccgaatatcagccggggaaaggacatatcattcaaactaaacttaatcttatttataatttaggaattgatagtactgatactagaatggagctcccttgtaaaatagaaccattagctcaaagtaaaaataacattgttggttttcagatgggagcatcaacacaagagcgtagatggcctgttggatcttttgtggaattagcgaaaaaattaattgatagtgcgccattattacaaataaagctaataggttcatcgagagagctggaattgccagaagaattttttgctttgttacctgaaagatatcatcaaaatatagaaaatttggtaggtaaaacctcactacctgatctgttaagccaaataaaaaccatggcggtattaatcacgggagatactggcccgctacatttggcaatagcattacaagtacccacagtgagtttatttgtgacggcagacccaacatggacagggccttatcaggataagcatttacatacggtaattagtaaaagagtaaacctattagaatatattgatatgcctatgaaaattattacagttgatgaagtttttgataagataaaaagataagatattaataccttatcttttagagtttattttataaatttgattcttaagtatctttttttgatgcttatttttattgatttatcaaagataaaattaattaagttaattttattaattttatcttttaatttatttactgtatcagaactaagttctgttttatatttatataaatgaattatacaatgcgatatatttaaattgatatatttttcagggaatatctcttgcatagaaagaatagccttagccattaattctattttttctttacttaggttatttgaaagactaccttgatgttttatatagttatataaaatattatcagaatataaaaacttattggataaatttagatattttggaaaaaagaaagcgtcttcataacaaaaaacatcagggaattcaatttttaacattatctctcgtaaaaaaaatttactgcaaaggtgagcctgaaattttttatgaattaaaaattctgatataatttcatctttactttctgttctatattctatttttccttgttcttttattatttgtttttcattaaaaacttcttgtattttagttataaatagatctggttcttctttattaagaatagtaaaaatatctaacatatcaaaatcagagaagaagtcatcaccatctataaatgtaatataatcacctttacataaagaaatagcgtgttttcttgccttaccaacattattaaagaatactttattataatggaatgaaggatgatgatttacatatttttttaaaatattttctgttctatctgttgagttgtcatctataagaagaacttcatagtcatttggatcacaattccttaagctataagaaatggagttaacacatttttctactaaatcctctagattttttatgttaactataatagataaaatcataatggatcctaaaatatactaaaaaataggtaatagttgcacaagtaaaaatatattttctttttacacatgagtgaaagattttagcacatctagtgcctgaatctcaccaatatccccacctgctgcttttaacgacctttgtgccttaccataaccgccgattaatcccggatcggtagggccaaagagggtaatattcggcttatctaaggctgcggttaaatggcttaatccggtatcgacagaaacgacactttgcgctccggcaatcacttgagccacttctgcgagtgacattttgggtaatacatcaacatagtcaaaaccttgagcaaggcgtattgcacgctgatgttcatgctctgcgccccaaggtagtttgatacgtaaacctgaattcgccagtaatgcaattaactctcgccaatgggtctcgggccaatgtttctcatcacgggtagtggcgtgtaagaagactaaataagggcgtttatcaatagcgggtaatgagagaaaatgctgtgctataccatagtccccttgagtggtgggaagtgggtaattaaggctaagggcaaatagctggcggatacgctctaccgcatgcatttttttactgacattgtggcgaatatcatagaaaaaactcgctaaaggctctctagcactgtgacgagaatagccgtgtttagtgcctttcgcatagcgtgtaactaaaaaagcgctttttagtaaaccttgggcatcaatcaccgcatcataatgatgtgcttgtatcgcgtgacgaaattgtgcacgttcagcgcgaataggcgcactaaaccagtttttacgccaacggcgtattgcgacaggaataacggtatcaacagctgggtgccagcttggaatttgcgcaaaaccttcttcaacggcccaatcaaaacagatctcaggatatgctgctcttgcatcagttaatgccggtagggtatgcagtacatcccccatggaagaggttttaacaatcagtacccgcttcatagcgatggctccgtagcgagtaattgctcgagttcgctaaagacttgttccggttgaatgtcgattaagctttggtgataaccttgttcagcatcgcctttacgcactttgtgatagccagtaattaaacgaataacacgagctttatcggataacgggggggtaaagtcgggactacttgggccataaagggcaactaatggacgctctaatgctgcggcgacatgcattaagccagaatcgttactgaccacggctttacaagcggcaatgaggttaacggcttgctcaagagaagtctcaccggccagattaatacaagcagcttgggcatcgggggttaaggcgtgtttgatctcttcccctgcaggcttatctttttgtgaaccgaataagaaaatctgatagccatattcgctaataagtttctgggctaatgtcgcgtagtggtaatgaggccagcgtttagcaggaccaaattccgcccccggacaaaaaccgatagcagggcgctgtgtagataatgaaaagtgcttaagtgtggtagtgatatctttgtcagagacagccagttttggccataataacggctttggtaaatcagcggctgaatgtacctgctgtttatcgtaagcaagcgcaacataacgctctaccattaatggaaatgcggctttatccaatgggcgtaaatcatttaataatccataacgcatttctcctcgccagccagtacgtttaggaatagcggcaaagaacggcactaaagcggatttaaatgagttaggtaaaacataagcatgagtataacctttggcttttagttgtttacctaagcggcgacgctcaccaattgctaaggcaccgtgacctaaaggcatagcaatggcattatcgacctcgggcattttctctaataatggacgacaccaagcgggtgccatcacatcaatagttgccgcaggatgtaacgcttttaatgtacgatataggctttgggacatcatcatatccccaacccaagaaggccctaccacaaaaattttcataaaccgcgattacttatcctgatttaaccattgcatataaagagcaacaccttctgcgaccgttttaaaaggggcgctgtagcctgctttgcgtaaatttgtcagatcagcttgtgtaaaggcttgataacgacctttgagtttctcagggaattcaatatgctcaacagagagatctttatcgttatgataagcgataactgcatcagccacggcttggaacgattctgcgcggccggtaccacaattataaataccggagacattgttgcgccagaaccataaattaaccgcagccacatcccccacataaataaagtcacgttggaaggtttcactaccttcaaataatttgggattttgcccgtcattgacttgtgtatttaaatggaaggcgacactggccatactgcctttatgcccttcacgggggccatacacattgaaataacggaaaccacacaccatagattgtgcttcaggtaaaatttggcgcacatattcatcaaataagaatttagagtagccatagacattaagtggggcttcatattttctttcttcaataaaatgatcagtacggccaccataagtggcagcagaagaggcatataagaaaggaatttggcgatcgaggcaataatgcagtaactctttagaatattgatagttattatccatcatatatttgccatcccattcggtagtagaagagcatgctccttcatggaatacggcatcaatatcaccaaaatcatcaccggctacaatactggcaataaagtcttctttatccatatagtcagcgatattaagatcgacaagattcacaaattttgtgccatcttttaggttatcaaccactaaaatatcggtataaccttcatcatttaatgctttaacaatattgctgccgataaaacctgcaccgccagtgacgataatcatatggctacccctttatataaaatctaaaaattagctctgcaactataataacactgaacagcgtgaacggtagcattcatcatagaagagtagactgaaattcttgaaaatcgcagtgatgattagtgatcttaattacacaaataacattatttatttacatttgtcgtttttaatcgaacaaaagcataaaataagaaacaataatgattatattatagtcaactctagctcttatctcttttcgtctctgccttaggagaaagcatgtctactcactctttctatcaacaaattaatcaacaactcgaacaaacacgtcaagatggcttatttaaaaatgagcggatcatcacttcttcgcaaagtgccgatattgcggttgctgatggtagtcatgttattaacttttgtgccaataactacttaggtttagctaaccacccacaacttattgcagcggcgaaagcgggaatggatagccacggttttggtatggcatcggtacgttttatctgcggaacgcaagatctacataaaacattagaaaagaacatcgctgaatttttgggtatggaagatgccattttgtactcctcttgttttgatgccaatggtgggttatttgaaacactgatgggatctgaagatgcaattatttctgatgcgctaaatcacgcatcgattattgatggtgttcgtttatgtaaagccaagcgttatcgctatgccaataacgatatggcggtgttacgtgcccaacttgaacaggccaaagcagataatgcccgccatattatgattgccaccgatggggtgttctctatggatggggtgattgctgatctaaaaagtatctgtgatttggctgacgaatatggcgcattagtgatggtcgatgactcgcatgcggtgggttttgtcggcacacaagggcgcggtactcatgagtattgtgatgtattagatcgcgtcgatatcatcacaggaacattaggtaaagctttaggtggcgcatcgggtggttataccgcagctcgtaaagaagtggtggagtggttacgtcaacgctctcgtccttatctattctcaaattctttagcccctgcaattgtgagcgcctctattgcagttttagatatgctgaaatcaggggatgaactgcgcgcttgtttatggcgtaacgcagcactttttcgtgaaaaaatgacggcagcaggttttactttggcgggggctgatcacgcgattattcctgtgatgttaggagatgccaaactagcgcaacaatttgcagcacgtttacttgatgaaggtatttatgtcactggctttttctacccagtagtaccacaagggcaagcacgtattcgtacacaaatgtcagcggcacacaccccagaacaaattgaacgtgctattgctgcatttattaaaatcggtaagcaacttaatgtgattgcataaggttctaatatgaaagcattgtcaaaattaaaagcacaacccggtatctggatgaccgatgtacccgtacctgagcttggtcataacgatgtgatgatcaagatccgtaaaactgccatttgtggtacagatgttcatatttataactgggatgagtggtcacaaaaaaccataccggttcccatggtggtcggccatgaatatattggtgagattgttgctattggccaagaggttaaaggttttaatattggtgatcgcgtctcgggggaagggcatattacttgcggtcattgtcgtaattgccgtggtgggcgtacacacttatgccgtaataccattggtgttggcgtaaatcgtcccggttgttttgcggaatatctggttattcccgcttttaatgcatttaaaattcctgacaatattccagatgaactggcggctatttttgatccctttggtaacgcagtacacacggcgttatcttttgatttagtgggggaagatgtactggtttcaggtgcgggacccattggtattatggcggctgcaatctgtaaacatgtgggggcacgccatgtggtgatcaccgatgttaatgaataccgccttgatctggctaaaaaaatgggtgtcacccgtgcagtcaatgttagcaaggaaaatctaacagatgtgatgaaagaattaggtatgaccgaaggctttgatgttggattagaaatgtccggtgcgccaccggcttttcgtaccatgcttagtacgatgaatcatggtggtcgtattgctttactgggtattcctccttcagatatggctattgattggggacaagtcatttttaaaggattatttattaaaggtatttatggtcgtgagatgtttgaaacatggtataagatggcggcgctgatccagtcgggtcttgatctctcaccgattattactcatcaatttcctatcgatgaattccaaaaaggctttgatattatgcgttcaggtcaatcgggcaaagtaattttagattggcagtaggagttataaagcgccctgaacggtgaaagggcgctacctcttttaaataaatacctatattaaggggaaaataggtttgtattatatttgtcgatgaggcttttctattattcctctaacaagattatttgaatttgtaacaactagatattttatttttttactttgaaatattttctttgcatgaagaaaacttttaggatcaccaaaaatagcaatattctttttaatgtgctttttgttttaagttaactatttctgtatatgggtaaggttgttgactttccgccatgtttttctataatccctttcagagcagttttttggccccactggcaacttgtgttgttatgcgcccttaaacaatctacttagagtcccgaggcgagctttagttagcagaccttgggatttgtcttttggggatataataaacaaaacaattagcctagtcctctcaaaaaatagaaattaatatcatcttctttttcttcaagtaacctaatttgatctgaatattttccactaaatatttttatttattcgactttatctttgttgctttctaaatgctgggaagggaattgcttatcttgttcgaaggtcattaattttttagtaagtactttcataagagtactttttttcattgaaataatggcttgttgtgctggctttaaccatgttgcaggttttggctctttagattgctctgttggcggtataacagcgggtggctcttgcaccattgggctgtctggtgaaggggttaacaaaccactgggtgcgactagctgaatatcggcaggtagtagtggtaactgctgttgtaatgcccttacggttgaagggtgggggtgaccaatggcaatggcaaaaccatttttacgcgctaaattaatagcacgattaagctgttgtcgggtttctgcttctgtttgcacattatctaaaaatacatgccggcgtaaagaaggaacgccagccgctttggctgccgtggccgcttgcgtattgcctatagtgacactatcaagaaaatagagatcagaatgattaagggctttgatcactctatccatcgcttgcctatccgatgtcatcgcactccccatatgattattcatacccacagcataaggcacacgattaattgcattttgaataatacgattaatttcagcctgatccatggaaggctttaaggtatctttttctaatggctgtttgctaatgggtgccattggcatatgaataagaatttctcgtccttgggcatgggctttcgtcgccatctctttaccatggggtgagttgggtaatatggcaatagaaacggctgttggcagttgtaagatttggttatcttctttttttcgataaccaaaatcatcaataacaatagccaattttgccgaaaaagcaggtgcactgaatagaaaacttagcaacattaaactaagtgttagcgcgatatttcgttgtaatgtgccaagtaaatgcaaagctacctcccaagccaaggaactgggttgactgcttttccttggcgtctaatttcaaaatagagcgctgaacgctcttgtccaccactgtttcctaccaaggcgataggttgtccagctttgacttgctgaccaacattgactaacgcactttggttatagccataaaggctcatatcccctttgccgtgctcgacgacgaccactaaaccatatccttgtagccagtcggctaacagcacccgaccatccgcaatcgcttttacttcggtgccttgtgctgcggggatcacaattcctttccaacgtaattcacccgagccggaaatagactcaccaaagcggtgtaataaactgcctctaataggccaaatagcctgacctgcaggtttacccaatccgccagtacgggacattaaagagcgttcttcggcggtgggtttataggtcgaaccacgctgttgcgcttcacgttgcttggcggcaatacgagcagcttcccgtgcttcacgctcagctcgcgctttggcttcacgctctgcttgagcaattttatttcttaagcgtatttcattagcacgcatggtggctaaattgcgttgatcttcttttaaggttgattctagttgcgttaatgttttttgacgtgcagctagcgcattatctagtttttgtttctcttgttgctgtttggtgagtacctgcttttgctcgttctgtttcgcttgttgggcgtctttttctgcctgtagctctttggaagtttgcgccaattgctccattgactgtttacgcgcttcatttatataactgtaataggctaagatccgctcttctcgctgaccttcttcaccgcgaaacagtaactcaataccttgatgttttccttgtcggtaagccgcatcgagttggcgtgctaacagtgcttgttgctcgttatattgcttttgcaatcgggcaatatttgcggtgatggttttgatctctttagctaaggtttgtaagcggttttgcgtctcatgcacagagcggctggcattagcgatttgtgtctcttgtgatttgagttgtccaagtaaagccgtgcgctgtttttgttgctcttgaacgcgcttttctttttcagcaatggtggtttgtagatcttttaactgactacgattatccgttaatgtattggcaaaagcgctggttgcagaaaacagagatgtgctaatcagtagcgtgattaacggtaaagaaaatacacggtaagtacggtgtgttgtgttctgaagatcctttttctctgccatctgaccaaagtacctttaataacagtttataagattatttcatgtcgctaatcaactgaccagttaacaggaaataaagtcgtaatttcagataatacctaacagttaatctaatgaactcagagatgataataaagcaataatagtcggaaagaggaaaaaagcagcacaatgtgtaacagcgcaatagaatagttatcacgctgtacacaggataaattattgttcgacgatggtaccccacagatcatattcatcggcatgctcaattagcacacgtacaatctgtcctggctcgacatcaaactgctcattaaggtaaacagcaccatcaatttccggtgcatccgccatactacggccaatagcaccttcttcatccacttcatcaatgataaccggtaaaactttacctattttctcttgcagacgctcggtggaaatttgttgctgtagttgcataaaacgatggtaacgctcttcttttacctcttcaggaacttgatcaggtaattcattcgctttcgcaccttcaacggggctatacttaaaacaacccacgcgatctaaacgagcttcggttaagaaatccaatagcatttggaaatcttcttctgtttctcccgggaaaccgacaataaaggttgaacgtaacgttaattcaggacaaatttctcgccaacgttttacacgctctaaagtacgctcaacagagcctgggcgcttcattaatttcagcactttcgggctagcgtgttgtagcggaatatctaaataaggcaaaattttgccttctgccattaatggaataacctcatccacatgtggataagggtaaacataatgtaaacgtacccaaatccctaattttgccagttgttcacataaactgaccatactggttttaacgggcataccatcccaaaaaccggtttgatgtttggtatcaactccataagcggaagtatcttgtgagataaccagtaactctttcaccccagcattgactaatcttttcgcttcatttaacacttcaccaattgggcgactgtctaaatcacctcgcattgaaggaataatgcaaaaagtacaacggtgattacaaccttcagaaatttttagataagcgtaatgacgaggggttaatttaacgccctgctcgggaaccaagctggtaaatgggttatgggaaggtttgggaacatagtgatgaatatgtgataacacttgttcataactatgagggccggtgatttccagcacttttgggtgaacttcacggatttgattttctttggcacctaaacaaccagtgacgataactttaccgttttcatcgagtgcttcgccaatggcttcaagagattcttgtactgcgctatcaataaagccacaggtattgacgatgactaaatcagcatcatcataggtaggaacaacttgataaccttctgtacgcagttcggtgaggatacgttcagagtccaccaaatttttaggacaacctaaagaaacgaatccaattttaggcacttgatttgtttgcgacatgctcgtgttctcaatacttttaataaataacaaatagtggttgtatctcagacaggtgtgaaattctacgtacgagtgactatttttgtcacaggctttgatgatgaatgctgatttcttaatagcttacctgaagagagatccggtaaagtgaaaagagagactcttttaaacgctgttttacaggatttttcggcgctaatggtacataaatccgtcaataaaaaaaatgattgttgagaaactttccgcaaaaactgaaagagaaacgaaggaataggctgtaattgcgccatgacaaaggtatactttggctctttaatactatttttaactaacgagagtgattgcatcctatgctgcaagaagtaatgcaattttttagccggcacaccctgttaagttttatctggattgcgctgctggtggcggtcattgtattgacctttaaaggccttttttctaaaacgaaaaatatttcccgtacagaagcgatttctttgataaacaaagagaatgcggtttgtgttgatatccgtagccgtgatgagttccgtaaaggacacatcatcgattctatcaatttaacgccttctgagatcaaaagtaacaatattgctgagctggagaaatataaatcacagccggtaattgtggtatcaccatcaggtattgagggtgcaaaacctgctgaaagccttatcaaattaggttttgaaaaagtctttattttaaaagatggtctttcaggttggagtggtgagaatttaccactggcaaaaggtaaaaagtaacgagcgggcagattgagttctatacttactgctattcaatttaataaggatataaaaaggtaagattattatgtcagaacagcaaaaccaagagatgacttttcaaattcaacgtatctacacaaaagatatctctttcgaagcgccaaatgccccacaagttttccaaaaagagtggcaaccagaagttaaattagatttagatacttcttctaatacgctagctgaaaatgtatatgaagttatcttacgtgtcactgttacggcaacaatggaagaagaaaccgctttcctgtgtgaagtacaacaagcaggtatctttactgttgaaggtatcgaaggtacacaattagcacattgcttaggtgcatactgcccgaacgtactattcccttatgcacgtgaatgtatcaccaacttagtgggtcgtggtactttcccacaattaaacttagcacctgttaactttgatgcgttgtttatgaactatttacagcaacaacagcaacaggatgcagcaaactcaggagttgaagaagcttaatgaacgcttctatgacagttatcggtgccggttcatacggcaccgctttagcgattaccttagcgcgtaatgggcacgatgttgtgctgtgggggcatgatcccaagcacgttgcggcattagaacaagcgcgctgtaatcaagcctttctgcccgatgtttcctttcctgatagtttatatatggaagcttctttgcaaaaagcgattgaagcgagccgtaatattcttgtggtgatcccaagccatgtgtttggtgaagtactgcaacaaatcaaaccctttttacgtcaggatgcacgtgttgtttgggcgacaaaaggtcttgaagcacatactggtcgcttattacaagatgttgcccgtgaagtattaggtaatgaaatcccgctcgcagtattatctggccctacttttgctaaagagcttgccgcgggtttgcccaccgcgattgcagtggcctcgacggataatctctttttagagcagttacaacagctatttcattgtggtaaaagtttccgagtctataaaaaccctgattttatcggtgtgcaactgggtggcgctgttaaaaacgtgattgctattggtgcgggtatgtctgatggtatgggatttggcgctaatgcgcgtaccgcactgattacccgaggtctagccgaaatgagccgtttaggtaaagccttaggtgcagatgcggcaacttttatgggcatggctggtttgggtgatttggttttaacctgtacagacaatcaatcacgtaatcgtcgctttggtatgatgctaggtcaaggtttagatgttgatacagcccaagagaaaattggccaggtagtcgaaggttatcgtaacaccaaagaagttcgcgcattagccgaacaagtgggtgtagaaatgccaatcaccgaacagatttaccaaattttatatcaacataaagatgtaaaagaggctgcattggctttattagggcgagcaaccaaagatgagatagacagtagcctgtagtcagtttattttaaataatattcttagggtatctgttttaactatccatttgtttgaaaattcaaagcctaagtatttacttaggctttcgtgtaaaaaatgagagtgagtatgtcgctagaagaactaacaagagtctgggatcatattaaaagcgaagcgcgtgcattggcagattgtgagccaatgttagccagtttctttcatgcgacacttctcaaacacgaaaatttaggtagtgcattaagctatatgctggccaataagctggcaactcagactatgccagccattgcagttcgcgaaattgttgaagaggcttatagtcacgatagctcaatgattgagtcggccgcttgtgatctctccgcggtacgcctacgtgatcccgcggtggataaatattctaccccactgctctatttaaaagggtttcatgcactacaagcctaccgtattgcccattggctatggcaacaaaatcgccaagcgctagctatttatctacaaaaccaaatatcagtcacctttggggtggatatccacccagcggcacgtattggacacggtattatgctcgaccatgcgacaggtattgtgattggtgaaacggcggtggttgaaaatgatgtctctattttacaatctgtgaccttagggggaacaggtaaaacaggaggtgatcgtcacccgaaagtgcgtgaaggggtaatgattggcgcaggagctaaaatccttggtaatatcgaaattggtcgtggtgctaaaattggtgctggctcggtagtattacatgaagtaccagctcatactacggtggccggggtgcctgcccgcattgtcggtcgtcctgatagtgaaaaaccgtcattcgatatggatcaacactttaatggtgttgtacccggctttgagtgtggtgatggtatttaactatgcatgctcaagctaaggttacccttgctgaactaaaagattgcttacaggctgaatatattggtgataaaaaaccctttagttggttaagactatttcatcgagtatttttctgccagcgttcccgttacctattttggtggcgggtagcacagtatttttatttctctccccatcgctttttacataaattaggtattcggatcggtgctagcaataatcgtaagtactgtaatgatatctcgttaaaaactcgtattggtaaaggcctttctttaccacacccgattggcattgtactgactaattactgccaactgggggaatatgtcactattatgcaaggggtgactattggcgtaaaagagaaagggggaaaagccaatatccaagtaggagatcatgtttatattggctgtaattcatccattattggtggtgagattaatattggtgataatgcgattattggcgcccatgcattagtattaaaggatgtgggggaagggtgtcggtatatcacgaaagtgattgccgatatcaggcgggtataatgcttgaacaaaggtttataaaaaaggtgctgaataaatattagcaccttttttagtttataaataaagataaaatcaagtaataagtatgaattaaaataactttaattaaccaaactaaccactaaatcaatctcttaataacgcacccggatagcctaattggcgccatgcctcaaaaacaaccacggcaaccgtattagaaagattcatactgcggctatccgctaacattggcacacggattttttgttgtgttggcatattatccaacacataaggtggtaaacctcgtgtctcagggccaaatagcagataatccccatcttgataacttacattactatgggcgggagtacctttagtggttaatgcaaacaaccgcgcacctgtcggggattgtgcattatcagggcttaatccttcactttctaaaaaagcataataatcgtgatgctgtttgatatcagcaaactcacgataatcaagccctgcacgacgtagccgtttatcatcccaagtaaaacccaatggttggatcaaatgaagatgaaagcctgtgttggcacacaggcggataatattacccgtattcggtggaatttcgggttcaaataagacgatattgagcattatttattttacttgataatagtttttataccaatcaacgaactgttttacaccttcatcaacgcttgtttgaggtttatagccagttgctttaaataaatcctcagtatctgcccatgtggtgtacacatcaccgggttgcattggtaacatatttttatctgcttttttacctaaatgtatttctaatgcactaatgtaatccattaaatttaccggagatccattaccaatattataaaccttatagggtgcagaactatctgctggagtacctgtacttactttccaatcttgctgggctgtagggatcacatcagcaatacgtgtaacaccttctacaatatcttcaacataagtgaaatcacgtttcatttcaccatggttatagatatctataggctgattgttaataatggctttagtaaatttaaataatgccatatcggggcgtccccaagggccatagactgtgaaaaaacgtaatccagtagtcggaataccatataaatgagaatagctatgcgccattaattcattagcttttttagtggctgcatataaagaaacaggatgattagcctgatcatgaggagaaaatggcaattcatcatttaagccatagactgaacttgatgatgcataaacaagatgcttaacgttattgtgtcggcacccttctaaaatagttagaaaaccagttaaattactatcagcgtaagaaaacggattaattagtgaatatctaacaccagcttgtgcagctaaatgaataaccctatcaaatttctcaatctcaaataattgagcaattttttctctatcagctaaatcaataaaagaaaaagagaaattatctagttgatttaaaagattaagtctagcttcttttaaagcaacatcataataatcattaaggttatcaataccaacaacggtttcaccctgctggatcagtttttttattagatgaaaaccaataaatccagcagcacctgtgactaaatatttcattacgtaattaatccgtttctattaattaatcgttaccaaagaggtctcgagtataaactttttcttcaacatcgtttagtgctgaagccattctattggtaataatgacatcagacatggctttaaactcatctaaattatgaattaattttgagttaaagaaagtctcttctttcatttctggctcataaatcactacttcaatgccttttgctttaatacgcttcataatgccttgaattgaagaggagcggaaattatcagagcctgatttcataattaaacggtaaacaccaacaatcttcggtgatttagcgataatagaatcagcaataaagtctttacgggtgcggttagcttccacaatggcgccaataatattattaggcacggattcgtaatttgctaacagttgtttcgtatcttttggtaagcagtagccaccataaccaaatgatggattgttatagtgattaccaatacgcggatctaaacagacaccttcaataatttgtcttgcatttaaattgtaagcttgggcgtagctatcgagttcattaaaataagcaacacgcagtgcgagataagtattagcaaataacttaatggcttctgcttctgtagaatcagtaaaaagaacatcaatatctttttttaatgccccttgttgtaaaagctcagcaaatttctctgctcttgcagattgctcaccaatcacaatacgagatggataaaggttatcgtaaagggcacgaccttcacgtaagaactcaggagagaagataatattatcggtatgatatttttctctcatctgtttagtaaaaccaactggaatggttgattttataatcatagtggtgtttggattatattctaaaacatcacgaataaccgactccacagaagaggtgttgaagtagttagttttaggatcataatcggtaggagtggcaatgataacaaattcagcatctttataagcgaattctttatctaaagttgctgtaaagtcgagttctttagtagctaaaaactcttcaatttctttatcagagataggagagatttttttgtttaatagttcgactttttctttattgatatctaatgcaacaactttgttgtgctgggaaaggagtatcccgttagatagaccgacatagccggttcctgagatggtgattttcattttttatcctaaagttacataatttcttttaacgcatctaaatatttttttatgactattctttcatcaaattcagtttcgattttttgcctactattttgacccatttttagttttttttcatagggcaagttaataaatctatccatggcatcaactaagcttgatacagacttaggttgacatatatatccattaaaaccatgagtaactgtttctcgacaaccaacattatcagtagtgattatgggttttcccatagctccagcttctagtaatgtttttggcactccttctcggtaaaaagaaggtagaactatacaatctgcttgggctaattcattttctacggtatcagatgtacctaaataattaataattccctctgctacccagttattcatttgtttatgtgtgattgctgaaggattatttacaccaacaaatcctaaaagacaaaattcaactttatcgccatatctttcttttaagatacgtgcagcttcaacataaaaagtaacccctttttcataaagcattcttgccactaatagaaatctaaatttatgtttatattctgacaatgacaatgtaaagcgagataaatcaacacctgaaccaggcaatctatcaacttgtactttatcgacatattttttttctaaaaataatgaaaggtcatcgttattttgaaaaaatattttatcagcatatttttggctatagcgatataaatttcttgctagtttacaactaatagtatcatttacaaataatgtacctaaacctgcaatattattgatgacttttattttgtttaatcttgctgctaatgttccataaatattatttttaggagtgaaattaagtacagcattacatctaagttgtttaaatattttataaaatgaaatcaatgtataaaggtcaatcaaaggatttttactggctgaatcaattttgatatttatatgttctgcacctaattcttttagtttgttagagtaactatcaataggtgaaacagtataaactttaaatccagcttctattaaagatattatagtattttttctaaagttatataaataccaactggtgtttgatgtaatggctataattttcatgttttagtcttttacttaaaattccagtatagaatcatattttttctaaagtatgatttatttctttataataatattctagtgaatatttattatattgactgtgagagtaaaaaccagcttcatttttatactgcttatttatagtcgttatcatcttcttaatttcactagtagtaatattatttaataaaatagagttttttgatttttctgctatttctttcattccaccatagttcattgtgataactttacatttagaaaaaataccttcaattaatgataggggagcgttttcatagcatagtgaaggtaataatatgtagtgagatttgtttaatatttcttgtatataatttttatctttaaacccatataatattatatcaatgtttttttcttttaatttttcttttaatctaataattttttcttttaattctccttcgccgaatatatttatactcagtaatttctgagaagaagtatcacaattacaaatgcattcaagaaaatcataaatacctttatcctttgtcaatctaccagcaaaggtaatcataatctgtgagtcacatttttttatattattgttgaatgcatttaaattattaattggattataaataagttttttattttcaaatggcaacaagttataaatgaaattactaggacatatataagtatctataacttttcttaaatcaaataaagagtaataaatataccattgaagaattctagctaagccatgaatataggaacgtctatccagtttagatgttaacaattttaaaaaagaaggtggagttacaaaaaaagctttttcttttcctttatagtaactcaaagaattgcttggtgatataatatgataatcatgaacagtcataattattttacaatatgtatttttcttcttgtgtagatatatagctaataaaattaaaggactaagtaagttgtcataattatgtatatgtacaacatctggggttgttttttctaaagttgtttttaattttttatatgcatttatattaaaaatataatttctaggattgaaattaaaataggtactaccaaagaaagtatatgatttccagcctctatcatcgaaacattttttagtatcattagtcacttgggcgctaccgcctttgagactattatcatttatgaataatatttttttcattgcttaactttttagggaatttttttaagaaatagatgattatgagaaatagtaatgttagtttaaatgatgtaaaaaaatatgttattccataccattgtatacgacattgcataatgtaaaaaacaataaatatgtattttatataattatttttatttttaaatgtaaatgtaaagaatagaaaatatattatattaaataaaataacaccatagctagagaatgcaatataaaatggagaataaaaaagtccaccaccgacattgtgtatataattatttaagaaccaagtaatgttttcttctgaactaactcctcctcctccagccaaaggtataaaagatttaattatgttaaataatggagtgaatgagtttccattatgctcaacataccaaatagaggaaagatatacatgaattacatcaactacagtacctacagataatagggattttgttataaataatgagatatcttgaatttgaatattagacctagcagcaccaataatactagctaagatagagaaagaaattaatataaggaaaagctttattatattaatttttctttctgttatattaccattactatcttttttcaataaaaataacaaaataatagtgattattgtatctgctctttcaccagaaaggaagcatattattaatatagtataagtaagaatatttattacatcatattttttggatttactgaataaaataaagatactcaatacattaaatacacctccccatgaaccgaatatcaaattatatcgtatcgtatcgcttattcccattgctttagggtatgcaataaaagaaattaataaaaacaaaaaaaataaaatacagcgaactggaatccctaaagaaatagtttttaggctaaaaatggtttttctataacttagtgaaataattaggataaaaatataactaatgactagagggatgattgaagtaatcatatcctgtttattatagtaatttaatcctatctgtttaattatcctacctacatcgtagttaaaacacataataaatataatgaaaataggataagcatatataactaggaataatttcattaaattacttttataaaaagtaataggtaaaaaaaataaaattaaagaagttaatattaacattttttaaaaaaacctataccacacttttctctaataatattatttttgttatcaagtgttttttctattaaagttaaggataaaaccctaaaccatgttgaaaaaatgtcgctatcatcaatatatattttataatctttaatcccactatagcaccatgttagtttttgcttaaatagaagggaataaattatatttttatttttcataaaaaaactattttttgcatcaatgttttttctttttaaaatcaagcgtagtggtattatatgaataatgtttttccagttaaagttacgtcttttagcccaacaaaaaccaccatcataattttgatttttagtgagtgagttataagactttaatagcgattttcttattttatttttttctgctccgctattaaataatctacataatatatctataccatctaaatcatcacatgaacctccaccagaggcatatgaatataacccgtcatattcttgaattaataaagtgctattaattatttcttccttatgctgaatattaattcccaaataatcaaaaaagaataaaaagtgaaaagctccagccatttggttatgcaaactagatttattattacaatcccaatatccagtgttattagattggttctttatgagccattctataatcgtttgtatataaatttcattttctagctcataattctcttgttcatatatgaaaaaatagagaataaacataatattgttagaaactaaccatggatttttccaattcaaattttctaaccaagattttaaatatgctttatctttgtattcttttagaaaaactaaattatgaggtagttctatatttaacatgtcacataccataattgcatggtaagtgatttggtggcttatatatttataatcatgttggtttttattatttttttcaatgatagaatcatagaataagccatcattattttgatgttttagaatgtatgatacactatcatctgttattaaatttttttgttgcaatacttctaatgcaagtaatgcaaaactcgttgataaacagcttgcacagctactttttttagaaaaagaatatgaaccattatcattttttaatgagtttataaaaattaaggcttgcttagaccagtttttttccatttaaatttatttccaaataaaatatactgagataatgtatttaaactaacaacaattaaagtactataaaaaatacctataaaaccatataaatataacaatgaaaaatctaatataacattaataatgccaaaaaataaggttgttgacgctactatttttgcaaaccctaaaggaatgattaaggcttgagtttgtaatatggcaaatatccttattggggcacaagctatgagtaagggaataatagatgaataagtagaataaggaatacctaataactgagtattatagttattttttaaaatataggatgataataaatataaagtaatacttaacataatacttatgcaaaaggaaatattagttaatttttttattttatcaatattagtattaataactctgggggctaaaacttgagctattaatccaaaaggtaaaatgcaatacatcaataaacgatcaaatatttcataggtagtaatttcagataaataattatatttacctaatattattatatctgcctttgtgtataaaaattggccaacaaacccaatgccgataattatagagtaagatgtaacttttaataaatattttttatcaaaagaaactttagaaaatattttttttctgcaattgtaaatatattgtagtaacaatgatgaataaaaaataagatttaaaagtagcaatcctgctatttttaaatagtacacaagaggaaatattaaaaatagacaaagtaaagctgataaaaaattatattttgcatttattttaaattctagttttcctcgatgaataccatcaaaaatagaacaaattggcattatagataatgttattcctaatagtattttaagattaaattctaaatttgataaaacaaaaaaaatgatcccagatagtgaagtcaatacaaagaaataaggaataattgatctatatatcttttcttcgtttcctttattttctgctatttctttcattagtgtggttgataagccaaaatctaaaaataagcttaatgtaactattattgttgtaatatatatatattcaccaaaattatcagctcctaggtgtgaggaaccataaaataaaataataagttgtaataagtgtttaataccaccctgactaaatttataaataatatcatatattaattttttcattaaattatagactcacattgcttcataattcttagtgcttgtttctttaaaccattattttcttctattatatagtgtgtgctatatctatatttttcaagcgatgtttttactgcctcaatttgttctttctttttatttgaggaaatagaattattgtgaattctaagtttatatagtggtgtttttagtaaagccatattgaattttgcatgtttaactgccagaataaaattaaaatcctgagcatactttatctcttcatcgtaatttattttttctataattttttttctaaaaaagaaagttccatgtatatgagggttaccatattttaaaattttcttcttaaacgcgatacttgaacgaattttaggtattaatctaagattattttgagcggaaaattgtattgcttgtgatgtacagaaatctattttattttttatacaaaactttagttgttcttctattctattttctaagctaatgtcatctgcatcttgtctagcaatccatgttccagttgctaaatgtattcctttattgagagattttgttaatccttcattttctttatcaatgaatattattcggggatctcttttttggaattcagtgcatatatgctttgtattgtctgtagaaccatcattaatgactattatttctaggtttttatgagtttgatttattattgattctaatgattcatgaatatatttttctgcattataagctgagattattatagatacttttgtactttctatattttgcatttttagtaaaaacctaatctattgtttattatattataatcaaagctaccgcactaggtttacggcccccagagcgccaaaatttctcttttaaaacccttatctatctgtaatataagagttttattttataagtatactttatctgtacacaaaccccactgagattagactcttcaaaccagcgggtcaagtaattgatgggtattctaacattgattaggtatatataagtatcggaatatcggccgatttggcaagatcattctgaattatgtataaaagataggtataagaagaatatgctaccaatttattaataaatggtagagtttgctaatatattaattttattttttatttaaattggttgttagtaggcgttctttgtaactatgatatcttgctgatttatatagtttaaatgttttctgtagaaggggtaagaactcagtgtaaacattgttattttatgttatgtcatagctattgatgctcgatgattataattatttcaactactttaaatgtttattgatattcactaattttatttattaatttatagtatatgcaatgtcgactataggaaataacatttaattaaaaatgaaaaatcatcccaaagttagtgtattaatgtcagtatataatgatgcagtacacttagaagaagcgataaattctattcttaatcaaacagttaaagatcttgaatttatcattattgatgatggttctactgatgtgtctgtagatatacttagacgatacgaaaagcaagatagtcgagttaaagtatatactaatgaatctaatattggattagctaagtctttgaataaaggttttttactctcttctggtgagtatattgctcgtatggatgctgatgactatgcatatcctatccgacttcaaaaacaattagagtttatggaggcgcataaaaatatcatggtttgtggtacatcaatggaaatttatgaagaccataataagtttatggttccaccaactgcacataatgccattgctgcgggattaatttttggaacaaatttttatcatccaacggtgatgtttagagcgagttttatcggagataatcaaatcacatatccagaagattacaaatatgctcaggattatgggttatgggttaaattattaaagttgggtaaaaaagatatttttgctaatttagaagaacctttattaaaatatcgaacccatccagaaaaaaatagaaaaaaatactttaatacacaaacttcatttgctataaaaacacaaattagcgcattagagatatttagtattaatgcaaatgagaaagttttatatgatttgaatttttcctctgaatatctcacattagataatataaaaaaatgtaattctttgttggaaaaaataagaattaaaaatatacaatcaaaaccttacttttataaggagcttaaggttgccatcatcagaaaaaaagtttctttatttaggcgttgtgagaagaaaagtttttattatccttatatgaagttgaaagctcgatttatttatttaattaatagaaaaataattaagtccataaactaaggggattccccttagtttaacttaagatagttgccaaaaatcatatcaacgtttttaacttcttcattatttagttctttatccattcctgctgatggtataaatgttaattctccaaaatggataataccattgtttaaatataaatctactctaacaaaaggaaatggcttagacagcttttctgcatattcaaatagtttttgataattttgaggtttctctagtacagttgaaacatttctatttttataatcaataccatagggtagtagctcccattctttattaacaaaatagaatttgggatggtgagattccctttctgtgcatatcattacaaatagtggtttaccatggaaacaaaataatttgtaatcgtatggcaattcattattttttgtttcaatgaatttttcacaaattatttttttaggtacatctttataaacaaattctacagataaacgccaataatcttcatttaaccaagttgataatttttgttttattttatcaggagatatactatttttatctctacaaataatattgtatcctgctccatggttgcattttagtacaaatttatttggtaattcggaaaaattaatttcatgtggttcttcccatacctgatggatttcattgagtatctcttgacagccacattctttaacatattctctagccgcatatttatctgcacattgtgttaccagcgggttatctctatataaatttagttttagccattgcaatttttcattgaaagtttgcggatgtctcaaatctaattttttattcattctttctttatatattgattttgttatcaattttggaaaaacatcacagtacttataacgtaatttatttctgataatttttaagtatttattcattttaacgattaattaaagtttagtatttttgtattttaaatctaaaggcggcttttagatagcttatgtttattttgttttcggcaaccaaatctccactcttaacccccctaatgggctatcgtcagctttaacatggcctcgatgttgactaattgcggtttcaacaattgccagtcctagtcctgtaccgccggattctctatcacgtgcttcgtccgtacgataaaaaggtcggaaaatatgctcgcgatcttctgggctaacccctgggccatcatcatcaacaataatagtgataccctgattttgttcggtaaaagccacttcaatacgagaatgtgaataacgcaaggcattgcgaacgatattttcaaaggcactcgctaatgaataaggattgcaataaatcgtccatgggcctggcggggcggttactgttagggttttattgctttgttctgcctcaaatttcgcattatctaaaatatcgttccaaagctcattcgcttttacggtttcacgtaataactcatttttatactgattgcgggaaagcactaataagtcattgatcatgccatctagccgctgtgtttctgtttcaatacgctctagctctttactttcaccgctacgacgacgtagtaatgcactggcaagctgtaaacgagttaacggggtgcgcaactcatgggagatatcagaaatcaatcgctgttgcgcttcaaccatacgctctaaggcgctgatcatctgattaaaactggtgcctgccgctaaaaattcttgcgggccggtttccagttcagggtgagggcgcagattaccttttgccacatcatccgccgcatttttgagttttcgggccggttttgccaagctccaagagagccaaaccagtagcggtgtactgataagcatggtgaatatcagtaataaaagcggtttatcaaataataaattgataaaatcagattgcgggctacttgatgggcgcactaagtaaagttggtagtgatcttcaccatctctaatggaaaaggggcctaacatctcagagcgaccgtattttttcttttttggatggtctgcattatcagactgtcccataaagtttctgacaacttgtatttcattacgttgagcaccaataatacgaccttcactggtgacaataataagacgttgaccaggtggcgcccatttatcaatggcgcggattaatcgccgccaccatagcagatcgttagccggatcttgcgctagttcggcttctatatgttgctctagcataacaccttgacggtattcactttcaagtaaagtggtaagctggcgcgagtccagcttgggtaccatcataactagcactagaactaatgctagtgtcagccagaatatggcgaatatacgcgctgacaaactgtttatcataaagattttttattaagttattgaaaccataagataaccacggccacgtaatgttttaaaccaaggctgcccgtctgttctttccggtaacttacgacgtaagttggaaatatgcatatcaatcgctctatcaaaaggtgttaagcgtttacctaacacttcttggctgagatgctcgcgcgataccacttgtcctaaatgctgagcaagtagataaagtaacgtaaactcagtacctgttagctctaatggttcattatcaaagctggcctcttgtctacccggattaagttgtaacttatcaacttgcaatatgggtgaggtgttgccatcggtctgtttctgttcactccagttggaacgacgtaaaatagccctaatgcgtgcaactagctctctatcgttaaatggcttaggtaaatagtcatctgctcccagctctaggccaagtacacgatcaagatcgctgcctcttgccgttaacataatgacaggtgtttggaaattttggcgtaactctttaagtgtctcgatcccgttcttacgtggcatcatgatatccagtaataacaagtcaatagacgcgtccagaagttttaaggcctgttcgccgtcagtggcgagcacaacattaaagccttccatttcaagtagttctttcaatagcgaggttaattcgcgatcgtcatccactaataagattttatgcattcgtcaattcctccaagagaaaaatacgataataaatagcgcgaatctatgactttacgttcttttacacgctctgacgctagtttgcagccgtaaaggtatagtaatccacatcgagaacaattacacatatttaggtcagcattaataagtcggtattataaccgaatgaggagtgggacaatgcgtaaagtagcaatggttgcactagcatcaatgtttttagtagctccgacggtagtaatggctgaaacatcaaatacaaataatcagcctgctgggcaacaacagtataatgataattaccattgtggatacggttacggtatgcatgatggacgtgataaccgaggtcatcgtggacaacgtggccatatgatgggtaacaataatttcggtgagtcgcgtatgtttaatggtattacattaacagagcaacaacgcactcaaatgcgcgatttaatgcgccagcatcatcaagatcgttttaataacagtgattttcgtcagcgtcacgaaaatatgcataagctaattaccgcggataagtttgatgaagcagcggtaagagcgcaaatacaagatatggacaaacaagcaatagagcgccgagttgaaatggcgaaagttcataatcaaatgtatcagctattaaccccagagcaaaaagcgcagctagaaaagaattatcaacagcgtgtctcttctgttagtcagcaaaaccagcaaactcaagagaaagctaattagtgattaagtaaagtcctttagtaatgtagtaagagtgtagtaaagcagtacctagttagagagtaagtagcaacaacgaagttttttccttgccatagacaccatccctgtcttttgcagcccctctggagaggggcttttttttgctcttttgtttaccattccttttaaaacaaagagttagatttcatttttaagggtaataaaagtctgctaaagtctttaaaggtggacgtttttggctgtccgtggacactttgtggacattttaaagacttataaatgctagatttcctctttactttttagtgggttaaattagtggcttctttcccgtttcttgcgactatacttcggtaaagtaataccacctactttttatttctgtctaacctctatgaaaaaagaaaggataaaaatgtaataacgtttttttgtcagttttgttctttgtttttaggtacaaattctaaatttttatttacggtaaaaacattgctgatgatttaacaataactcaacgtgaacagctgagagcaatgttagaaatgattaaaaaaaggggggatcatgactaaacgtgatattttttctgagcttcaagaaggaatgaatgcgtggagtgaatttaatgaagggaaaaaaacactaaagactcaccgtattaatgttaagcctctttctatgacgccagcagaagtaaaagcagtacgtgaaaaattgaatttatctcaagctgtttttgctcagtatttacatacgggggttacaacattacaaaactgggagcaagggatagtaaaaccgaataaacaagcggttttactacttaaaatggttgaaaaaagaccggatacgttgattgagctagcaggactttgatgtcggtatgtttaacgataactgaataattaacccctctggagaggggcttttttttgcgtttttaattttattattgatatattattttatcttctggtagtgaattataatcgattcattcttccttaattaatctaatcaactacaacaacgcctctggagattcaggtaaaatctgtccgccatcgacaataatggtttgaccggtaatatattttgcttcattagaggcaaagaatgcggcggcatagccgatatcttcaggctcccctaaggtatgggttgggatagaggccttcatttgattaagataggtctctccttgggcttgtaagccttcggttaaaatattgccgggcataacggcattaatggtaataccgtggcgtgcatattctagtgcagcactgcgcataaagcctaactgacctgctttgcttgctccgtaatggctccagcccggatagccagtaatggcgcctgtaatagaagaggtgatgatcacacggccatattgttgtttttccattaccgcaagggctgcttttactaagaaaaacattccttttaaattgacggtatgcattttatcccaatcagcttcgctcatctctttaattgtcgcttgggggaaaataccggtattagagcaaagaatatcgagtttgccatactgtttaacaatatcattgactacttgttcacaggctgcttgagaggtgacatcaaggtgcataaaatcaacaccaagtgcttctttggttgcgttacctgctacatcatcaatatcagcaataataacctgtgcaccgctgttttttaatgcgctaacaatgcctttaccaataccttttgctccgccggaaactaaagcaattttacccgttaaatcaaacataaaacctcctactgtactgtttgttatactgtatcagccttattgtataaacggtaaattaacgcaaaatttttgtcatcagtcacaattgtgtagggtgggcgcttcttctatttatgccgaatgacaaaaaagtatcgataacagcgcgcaaagtgttaagcaaaccgtcaataagcccattacactttatatcttgatagtaatatatggctaacacactgttttttgagatagatagcaaaaggctgtaaagtatctgtataaaaagtgttaacttatcggtgtaatacagagacgatagactagtatagtatttatacaggctactcaattaatttaatgcgcatcaagtttataaaaaaaaatgtacgttgatgatgaagtgataaaaaatatgcgtacaatggggttgttgaatcaattcagcatttgagatatcggtggattacgttcgtgaagccggtattaagataacagttattccaacaatatattgcaataatgatatcgaataagaatcagaggtaatcatggttaatgggatcaaaagaattggggttttaacaagtggtggtgatgcaccgggtatgaatgccgcgatccgtggtgttgtccgtgcagcactcagcgaaggtttagaagtgtacggtatttttgatggctatatgggcttatatgaaaaccgtatgaaaaaactcgatcgctttagtgtgtcagacatgatcaaccgtggtggtacttttttaggctctgcgcgtttcccagaattccgcgaagataatgtgcgtgccgttgctattgaaaatatgaagcaaaatgagctagatgcactggtggttatcgggggagatggttcttatctgggggcgaaaaaattaactgaagcgggtttcccatgtattggtttaccgggcaccattgataatgacgttgcgggtactgattacactattggctatttcacggcgttagaaacggcggtagaagcgattgaccgcttacgtgatacctcaacatcccataaacgtatctctatcgttgaagtgatgggacgttattgtggtgatttaaccttatccgctgctattgcgggtggttgtgagttcgtggtgttgcctgaatccgaattaccttttgatcgtgatgaattattagcagaaattaaagcgggtattgagcgtggtaaacgtcatgctatcgtggcaattactgaacatgtgtgtgatgtacatgagctggcacgttttattgaagcagaaaccaaacatgaaacacgtgccactgtattaggccatattcaacgtggcggctctccggttgcttacgatcgtattttagcctctcgtatgggtgcttactctgtacaactgctacttgaaggttatggtggtcgttgtgtagggatccaaaatgaaaaactggttcaccatgatattattgatgcggttatgaatatgaaacgtgtctttaaagccgattggtatgaaactgcgaaaaaactgtattaagccatagttttactctattaccagagcctttctgagttatatccttattcgtggactgttctgatgcaatatcagcttgtatcagaacagcttcccgagtgaaaacatttcattctacgcgcttttcttctcttatctgatgggtaatgactgtgtgagtcccccgttttctcaactatatagctgttacgtataacagtctgttttttattatttcatcgttataaatctttctgtcagcctagttaaacaaaacaaataaaccaactagaaataggataggggtagataacgatgttaaaacgatggggattattgacaacgctagcgctgacggcactgtttacacaaagcatctgggcgaaggatattcagttattaaatgtctcttacgatccgactcgagagctttatcaacaatataaccacgcatttagtcaatattggcaacaaaaaaccggcgatcatgtgactattcgtcaatctcatggtggctctggtaaacaggcaaccgccgtaattaatggtattgaagcggatattgtcaccctcgcattagcttatgatattgatgccattgcacaaagagggcgtatagataagcagtggatcacccgcttacctgataactcagcaccttacacctcaaccattgtttttttagtgagaaaaggtaatcccaaacagataaccgactgggattctttaattaaacccggtgtatcgattatcacacctaatcctaaaacctccggtggagcaagatggaattatctggctgcatggggatatggattaaaggccaatcagcaagacagtgaaaaagcgaaagcctttgtaaagtcactgtatcaacaggttgaagtattagactccggcgcaagaggcgcgacaaatacttttgttgagcgtggtattggtgatgtgttaattgcatgggaaaatgaagcgctactggcgattaatgagttaggtacagataagtttgaaatagtcaccccttccgtctctattttggcagagccaaccgtctctgtggtggataaagtggttgataagcgaggtacgcgggaagtggcaaccgcttatttagagtatctttattcacctcaagggcaagaaattgctgctaaaaactattatcgtccaagagataaaagcattgctgaaaaatatcaaaaacgttttccagccctgcaattattcactattgatgagctttttggcgattggcaatcagcacaacaaactcattttgccaccgggggaatatttgatgaaatcagccgacgtgattagcgagtaacgcataaaaaaatcaccttctgttaagacacagtaaggtgattttcgcgatagttatttatcggtaagataacgatttgctatcaaagttattttttcgcttttgcttctgctgccgctttcacgataacagcaaaggcatccgctttcagtgacgcgccaccaaccaatgctccgtcgatatcaggttggctaaatagctctgctgcgtttttatcgttgactgaaccgccgtattgaataatgacttgctcagcgatagccgcatcttgtttagcgatatgatcacgaataaatttatgtaccgcttgtgcttgtgcaggcgttgctgatttacctgtaccgatcgcccaaataggttcataagcgatcactgcatctttgaatgcttgtgcaccatgtgcatttaaaatcgcgtcgatttgacgtgcgcacacttcttgtgttttaccagcttcattttctgcttctgtttcaccgatacataacacaggtgttaagcctaactcttttaacacaccaaatttttgtgcgataaattcatcagattctttatggtaagtacgacgttcagagtgaccgatgatcacgtatttaacatcaacgtttttcagcatttctggggaagtttcgccagtgaaagcaccagataagttaacaccggtatcttgggcacctaacgcaatacggcttccaccgatttcatgacgagcttggcacagataaactgttggtggtgcaatagcaacatcacatccagcaacaccgctgatttctttacgtaatgcagcgattaattcatgaaccatatgaatgctgccgttaagtttccagttacccatgactaatggatggcgcataacttttcctccaaccgagtggtttaaatttaatttatcgataaactcaaattctgttgatgcacaacagtatagagaacattgaatagaatagctttgttttttatcacggaatagctgaatcgatattgctattgagtgaaagcttaatcggttcaatggcaaaggtcgttagttgattgtcctcgtgggcaataatatagcgaatagcaccgacattatggctaatataagcaggcacatcttgtttaacagcaaataaattgagcacctcttgaatttgcgttgcattaatggagggatcaaactgtgtcactaatgcagtgatatagcgcattgcagtatcttgatgctctttttcgatttgtggcgtatcaagtgaatggatcagggtgagctgtagactcttaattttttcactgccacgctctaatacggctgatgagtataaataaggggttattcgtgtcgcggccctgactaacggaatagtaatatcgttgttggtgataattttatattcattgagaaataacgtcgcattattttgattgaatttagctcttatctccggaatggtggtttcaaaaacaggggcatcctgtttaaggtaaagaatatcatctttagttgggggttgatgagcaatagagggcgacgctgccatagcaagggttggcaaagataaagcgatgcttattatgataagtgctaactgagtaagcgtgcttttttttatcatctgtcctccttggtctgttgtgcgatagaatattataaaatcactctgtattatttgatgttaaatggacagcttaattcactaaaataagtctatattgagaaattattaatgaccttacaacattgggccttttcattcaaagggcgaattggacgccgtgacttttgggcgggttttgcactctgttttgtgctgttttgcggattatatacagttaatcagcactattcattgcctgctgtgctggtggggataatttcgctggctattttatatccgttatgtgccatttttactaagcgacttcacgatagaaataaacgtggtgcatggctgttactattgttgctggcggtgatgctaggattgactgataccagtagtttagagcccttttggcaatgggcgataggtcgttttctcccttcatttattatgatgatcatgttgttagattgtggggtgtttattggcacccaaggagaaaactattttggtgccacgactgaaaaggttgactactcaagtttttgttaaagtgtgtaactgctaaacagtcagggctgaataaagtgctattcagccctgatgttatcattaccaatactgttcactggtgatatgtcccggtttacggcgtaaatgttttctcatatcacgctgtgttttcagtaactgttgcgtgtctcttaccatttctggattaccacatagcataatatggctctcttctggggaaatggttaatcctacggttttttctaatgcaccactttcaattaatgctggaatgcgcccggttagtgaacctatatgattttcacggctgacaatagtttggatacgcagtttcccttggtagcgttcagctaactgctccattaatggtagatagcttaaatcacgggcgtagcgtactgcatggactaaaacaatattttcgaaacggtcgagatcatcaccaagttgtaaaatagagagaaatggcccgatcgccgtacctgttgataacatccataaggtattcgcgctaggtacctcttctaaaacaaaaaaaccactggcttgttctgtcactaagagttcatcaccaacagttaacgctgctaagcgtgggctgagtttaccttcaggtacagtgactagatagaactctaagttgggatcttgcggggagttaacataagagtaggcgcgttgtatacgttcaccgtcaatttcgagtgccagtttggcaaattgacctgctgtaaacttatcgataggggcgtgtacaaccaaactgattaatgtatctgtccaatgcctaacttgaatgacttttccagtaacccaatttgccataatctcttatctcctttttaggaaagcgcttatgtcgataatttattctaaagaggaagggcgtttttatttatcaagatgatgtgatggcgatattaatctgtagtttcgttaatcgttaatacaaaatgtacatttatattgacaacgatggtgtttttcactgacatcgttgacgagataaaaatggctgactacttcgcaaattttgctagatttgttaccttagtctcattatttagcgcaagtgcattttgcagagtttattttatcaaagctctgtagcactttcctgtccgttaatcggttaatttttaatttctgagcaaagaaaagaaatgagaaagttagaacatgcaaatctgttattactgattattgcactggttgctgtcggtcaaatgacacagacgatttatgttcctgtgattgctgatatggctgtctattttggtgagccaacaggtgctgtacagcaagtaatgggcgcatatctgttttcttatggtttttcacaattaatttatggccctatttctgaccgagtagggcgtcgtccggttattttagtggggatgagtattttctgtttagcgacgatcgtggctattttttcacagaacttaactaccttagtgatcgccagtaccttacaaggaatggggactggggtcgcaggggtaatgacccgtactcagcctcgtgatctctataccggtactgcgttacgctatgccaatagcttattaaatatgggggtgttagtcagcccactcttagcgccaatgatcggtggggtggtggcgcacttctttggctggcatgcctgttatatcttcctattattattaggaggaagtgtactctttagtatgtatcactggatgccagaaacccgacctgtacaggctgaaagacgcagtatgttgtcatctttttatttattgctgtccaacagtacttttagtgcttttttgatcatgttgatttgtgcattatcaggtattgccgtatttgaagcttccagcggtgtgttgatgggaggcgtgttgggtttaaatagtattactatcagtattctatttattttacctattcccgcggccttctttggtgcgtggtacgcagggcgtgaaggtaaaacctttgtgcaattgatgtggcactccgtattttgctgtgtagcagcaggtattttaatgtggcttcccggctggctgaatattattaatatttggactttactggtgcccgctgccctgtttttctttggcgctgggatgctatttccgctggcaacgacaggggcgatggagccattcccttatttagccggagcggctggtgcgttggtgggcggattgcaaaatgttggctcagggatagcaacgtggttctctgcactattgccacagcataatcaatttagcttaggaatgattatgtttattatgtcagtggctattatgttgtgttggatcccgttatcacaccgttttagtcatcagcagaatacggtttaatgactacctttaagttttcgccaataaaaatgccgatagtgtatacctactatcggcatttgttttatgtcgcctaggcgacttctctctcatagggggtgattagcgattaaccgcgatcttcccattcttgtgcgcgggcaaccgcttttttccagccgttataacgataattacgctctgtggtttcaatacctgggcggaactctttatcaatctcggctttattttttacctcttccagatcagaccagaaacctaccgcaaggcctgcaaggaacgcagcccctaacgcagtactttcacgtaccacaggacgttcaacacgggtacctaagatgtcagattggaactgcattaagaagttattggcaacggcaccaccatctacacgtagtgcttgtaagcgtgctccagagtctgcttgcatcgcatcaaggacatcgcgggtttgataagcgatagattctaaagtcgctcgaataatatgattacggttagcaccacgggttaaaccgaagatagcgccacgggcatacggatcccaataaggtgcacctaagccagtaaatgcaggtacgacataaacaccgttggtgtcattaactttagtggcaaagtattctgagtcagttgcttcatcaattaattttagctcatcacgtagccactgaatggaagcaccaccgacgaagactgcaccttctaaggcatagtttacttcaccacgtgggccacagcagatagtggttaatagaccgtggttagagcgcacggcttctttacctgtattcatcagcaagaagcagcctgttccgtaggtgttttttgccataccgctttgtacacagagctgaccatagagtgccgcttgttggtcaccagccataccggcgataggaatacgtgtaccacctttaccaccaatgttggtttgaccataaacttcagaagaaggcaccactttaggtagcatattgcggggaatattcagcagatcgaggattttttgatcccaatctaaagagtgaatattaaacaacatagtacgtgaagcgttggtataatctgttacgtgaacacgaccttgtgtcattttccagactaaccaagtatcaacggtaccaaagagtaactctcctttttctgctcgttcacgagcgccttcaacattatcgaggatccattttaatttggtgcctgaaaaataggggtcaaccataagcccagtattttgacgaatgtactcttcaaccccttcttgatcttttaagcgagtacaaaagtctgcagtacggcgacattgccacacgatagcattatagataggtttaccggtctctttttcccagacgatagtcgtttcacgttggttggtaataccgataccggcaacatgatcagaagggatgtcttctttggccaatacttcaattagcgttgcgctttgagttgcccagatttccattggatcgtgctcaacccagccgggcttaggataaatttgggtaaattcgcgttgtgagatgctaacaatgttggagtcatgatcgattacgacagcgcgtgaactggttgttccctgatccagagcaacgatatattttttttcactattcgatttgtttgtttctgttgtcatgttagtaacctgttttcataatcaacgatattgcttgcatcgttatttgtcgttttcaattttgcaggtatcacaaggtaagtgacggccaataagtttacgataagcaagtgcgcctaaaatacccccaatcattggagcaatgagtgggactaagaaataaggaatatcgcgtccacctgttaaagcaatatcaccccatccggcaaagaatgcgactaattttggcccaaaatcacgggcagggtttaaggcgaatccagttaatggaccaaatgcaccaccgataaccgcaatcagaataccgataagtaatggcgctaaaggcccacgaggtacaccgttaccatcatctgttaaggctaaaattaagccaacgagaataacggcaataattacttcgataaaaaatgcgtggatcacagagatttgggctgctgggtaagtagagaagacgcccgcagtaaagaggctttcttgtgatcctcgtacaattccattgacctgttcgtagtcgataaataaattgtaatacataaagtacacaacagcggcggcaaaaaaaccacctaacatttgtgcaacaatataagggataacttttttacgttcaaagcacgcaaacaaccagaatgcgactgtgaccgccgggttgaggtgagcaccagaggtacccgcagtaaggtaaacggctaaggcaacacctaagccccagataatacttatctcccaaagaccgagttgagcgcctgcgatacgtgctgctgcaacacaaccaagaccaaagaagactagcaatgcagtaccgataaactcggaaatgcattgacccataagagaggttttcgtctggctcatatattctatcctgaaagagggtgattttaattgttagtattcttttcgtattgaaaagataactgtaaatttatcgttaatgagcgtaaacgagaataagcgaaattgaattttgtgtgtcccatcatgaaaatgagtgaaaacgctcttaaatagtgacttgtacaacactaggagtgtgatcagaccagtatttttgttaaattgaaaaaagcaggtaattccacggaagatgctagacagttgttgataggctacttacaatcgggagtatcgattatatgggggattacagtatgtcatttgaagtttttgaaaaattagagtcaaaagtacaacaagcactagataccatcacattattacagatggaaattgaagagctaaaagagaaaaatgatgcactgaatcaagaagtgcagggcgcaagagaatcaagagaagccttggttcgtgaaaacgaagagctgaaacaagagcaatcaagctggcaagagcgtttacgtgctctgctaggaaaaatggaagacgtacaataatcgtccaccgttttcaccagttaaaaacaaagccactgataaagtggcttttgtcgctttatgcgttatctttgttaataagagaatggtctattattcttctaataaatcatcatctaaatcgtcatcatctaagcctaaaggctcttcagataagataatgccagtattatcagcataaagataatcaccggagaagaaagtaacaccaccaaagtttacgcggatatcactgtcgccgatgccttcacttgggcaacctgcaggaatggcagccatcgcttgaatgcctaaatcaagctcagataaagcgtccacttggcgtactgcaccataaacaacaataccttcccattcgttgagtaccgccagttgcgccaattcagcgtcgactagcgctttgcggacagagcctccgccatcaactaatagaatacgatctttaccgttttcttctagtaagtcataaagcagaccattatcttcaaaacatttgacagtggtaatttgtccaccaaaagagctacgaccaccaaagtttgagaaaagcggttctacgacattgatatcttcttgatagatatcacagagttcagaagtatcatatttcataggatttacgtcaggttgcctcaggaaagtccagtatatcccttaacagggggtgttggcaaaagactcactgacaattcagtgagtcaaatcaacaatagcggtaaattactctaaaactaaacctaaagaaaaaagaatattggttaacagcgccgctttgaccatatgttcaagcagtggtcgcatggcttcgccactaagatcagcattaacgcgtttaatatgcagtaatagcatgggaacggctaataaaaatagccacgccgtccaacggtgcatataaatcagggtgaacacaatcaaacagataatggctatggcaatcacgcaggtgtggtaaatccgtgagccagaagcccccaaacgcaccgccaaggtatttttaccggcttgaatgtcgttttcaagatcacgcatattgttaatgttaagtactgcgaccgagagcagtccgcaggcggtggcaggcagtagtgtcacaatattaaaagcattagcttgcaaataataagtgccaatcacacttagccagccaaagaaaattaataccgaaatatcgcccaatcccatatagccataagggcgtttccctacggtataggtaatggcagccacgatagccaataagcccatcactaaaaagccaatagcatcttcgggttttttacaggcgacaattatcaaggcgatacctgaaatacaggagataattacattgataattaaggcttttttcatttgagcaggggtgataacccctttttgcattccacgcagtggccctaatcgctcttcagtatctgtccctttaacggcatcaccatagtcattcgctaagttagagagaatttgtagtgtgccagcagttaaaatcgccagtaatgcaataggtagctcaaaatgacccgtccaatacgctaaggcggagcctgtcacaatagcaattaaccctaaaggtagggttttgggtcgtaaactttcaagccaggcttgtgtccggctaatggaatgttgagcgctcatgctgaaattcaatactcatgttcgttgttattataaaaataagaatgggaggcaagcctcccacgttaatattgctgattaaggatcgcataagttgattataaaataaatcgactcagatcttcatctgctacaagctcatccagatgctgtttcacatattctgcatcaataagaatagtttcgccttgacgttcactcgcatcataggaaatttcttccattaaacgctctaataccgtatgtagacgacgtgcaccgatgttttcagtggtttcatttacacgccatgcagattcggcaattttgcgaataccgtcttggctaaagttaatgcttaccccttcggtagccattaatgcttgatactgttttgttaatgatgcatttggctcagtaaggatacgctcaaaatcttctgcagtcagtgcttgtagttcaacacgaataggcagacggccttgtaactcaggaattaagtcagaaggactagagacttggaatgcgcctgaggcaataaacagaatatgatctgttttcaccataccgtgcttagtggatacggtgcaaccttctaccagtggtaataggtcacgttgtacaccttcacgagaaacatcagggccagagctttgaccaccacgtttacagattttatctacttcatcaataaacacgataccatgttgctcaactgcatcgatggcttgttgttttaactcttcaggattaaccagtttagcggcttcttcttcgacaatcagtttaaacgcttctttgattttcatcttacgcgctttttgcttttgtcccgctaaattttggaacatggattgtaattgattagtcatctcttccatgcctggaggtgccataatttcaacacccattggggtggccgctaattcaatttcaatctctttgtcgtctaattggccttcacggagtttcttacggaacgcttggcgcgctgctgaaggctctgaggatgatgccgattctgtgactccccagttattttttgctggtgggatcagtacatcaagaatacgctcttctgccatttcttcagcacggtaacgatttttttcaatcgcttggctacgtaccattttaacagcagaatcagttaaatcgcggataatagaatcgacttctttacctacataacccacttcagtgaattttgtggcttcgactttgataaaaggtgcattggctaattttgctaaacgacgtgcaatttcagttttacctacccctgtaggtccaatcatcaaaatattttttggggttacttcatgacgcagcgcttcatcaagctgcatgcgacgccagcggttacgcagtgcaatagcaaccgcacgtttggccttatcttgaccaataataaatctgtcgagttcgctggcaatttcgcgaggagtcatttcggacatgctctcaaatccttactcttttgaagagatttcttcaaagttgacattatggttggtgtagatgcagatatcaccggcaatattcagtgctttttccgcaatttcgcgtgcacttagatcggtgttttctaacatcgctctcgccgctgcttgtgcataagggccaccagaaccaatagcaatcagatcgttttctggctgcacaacatcaccgttaccagtgataatcaaagatgttgtttcgtctgccacagccagtaatgcttctagtttgcgtaacattctgtctgtacgccaatctttcgcaagttcaacagcggctttagttaaatggccttgatggagctctaatttacgctcaaaaagttcaaaaagcgtgaaagcatcagcagtgccgccggcaaatcccgcaatcactttgtcgttataaagacggcgtactttgcgaacattgcctttcatgacggtattacccatcgtcgcctgtccatcaccaccgattacgacttggccattacggcgaacacttacgattgtagtcatgagtcagcccctggtttatcaataaaaagaagtgggttgtgctttaatatcagaaaaaacacagcccattatgtgaattagatttataggtgggggagaaattttatttttcaaccccccgcagtacgaagaatacaacctgatacacctgcgcctgcagcttgacggcttagcgtattggcttgctctttattaaatgggccagataaaacgcggatccagccgtcatttcctttggtcacacggctttcgataccggaaaatgctaaggttgcgcgtacagattcggcttgttcattggttttaaatgaaccgcattggactaaaaagcgcgcttcagtcgtcgctggttttggtgttgttatcgcaggtgcaggctcctgttttaccggtgctgaaggttgcgaaggttgtaccgaaggtgcggtggttgtcggtggggtaatgacaacctgtgaacgtggtacttcaccgttataaggcacttctggtaactctaccgccggttgacgtttatccgcttcaatttgttgtaaaaaacgtaattgctccggtgaaagtgtcgctttcggattaatctggctccctgaagaggtcgctggtggctgtaatgggttccccacctgtcgattctcaagctctttgatatattgccaacgctcttgcggtttaggtggtaagttgttagttggttgttgccctgcacttgatgacgttggttcgacaacctcttttttattatgggtaataaaatagaggccgccaacaaatagcgccacaagcgcaattgctacaataagtgtggttaaaggcaacccactggccgcctttttacctttgcctttcgttgtctttttacgacgagcagatgactgtcctcgtcccacatagtctcgttgtgccacagttcgattcgctgataattaaatgaataggtatcacaaccgatatgttacttaacatagtgtcttttgcctagcttttaagccgacagacactttctcttactattaactcacaatctaataggcgagagccgggtgcaacaggtctaccttgtaactgatcaagcagtaacaacatggattgacgaccaatttggtaacgtggctgttccatggtggttaatgcaggctcgctatagcgcgtaatatcaaggttatcgaagccaatcacagagagatcgtcaggtaattgtaagccaagttttttagcctgccacatcacaccaatcgccataatatcgctatgacagaataccgctgtcggtggttcaggtaacgaaattaactttttcagactttctgcaccgctttcgtgggtaaaatcacctctaataatataatcttcgcgtagagggacaccggttctacgcatagcttgaatataaccttgtaagcgataacgacatagtggcatatcttcagggccagtaatacaggcaatacgcttatgtcccatctgttgtagatagtgggtggctctaaaagaagcagtcaaattatcaatatgaacggttggcaattcaagctctggcgcaaattcatttgccatgatcataggaggaagatttttttgctcttctttagaaacatcaaaagggatatgagagccaagcagtaacatgccgtcaatctgcttagtaataattaaattaataaaggcattttcatgtttttgttggtgtttacagtcaccaattaacacaagatagccgtgttgagctgcggtttcttcaatgccacatacaacatctgtaaaaaagggatcactgatgttagggacgatcacgaggatcgtttttgactcgttacgtttcaggttttttgacaaattatgtgggtaataacccacgtcaagaacagcttgctcaactttttgacgggtttgtgaggatactttttctggattcattaatgtgcgtgacaccgtggctgttgacacgccagcagcaaaagcaacatctttcattgttgcttgtgcgctctctttattattctgttgcaaaccccatacctccgtactgatggtttggttaaacgattgcttttttgttgcaaaaaaaccgtcgttgtccaaaatacaaagatgcgacggttttttaattcaagaaatattctaaattgttattttacccactttttgaatagatactgttacctagtttgcataaaaagtgtgataccaatcgtttttatgaggtagttcgcaaaattgataaatagttttgaattataagcgcgctaaatatcagtaggcttagcaatcagttggatcaacatcaatattccatttcacttttttactctcaggaagcgccactatctgaggataagtaacagacattaacttttgtaaataaccccttgaaggatgttgcaataatagttgccaacggaaatttcctcctcgttttgcctgaatggccggaatggggcccatcacccataaatgactatctctcatcggatgttgctcgaagaactgtttaagctggcgtaaaaactggggggctttttggttattatgatcttcagagcggatcataatatggctggaataagggggtaaaaaggttgcttgtcgctcttgtaacgcctctttagtaaaagcatcatagcctttttctaacagcgttaataatagcgggtgatcgggttggtgagtttgtaaatagacggcaccttgtttcccagctcttcctgcacgacctgatacttgagtataaagctgagcaaaacgttcagcagcacgaaagtcactagaaaataaagcaccatcaacatcaagtagcgccaccagcgtaacgtctgggaagtggtgacctttagccaacatctgtgtgccaattagaatacgtgatccaccttgatagatgtcttctagttgttgctctaatgctcctttacgactggtggtatctttatcaatacgggtgatcggggtattaggaaataactcgccaatgccttgttcaagttgttctgtgcccaatcctactggcattaaattagttgaaccacattgagggcattgtgatggaatacgacgttggctatcacactggtggcaacgtagcatgccgtgtttttgatgtaaggtataatagtgatcacagcgagggcattcggcaatccaaccacactcatggcagagtaacgcaggcgcaaagccacggcgatttaaaaacaacatcacttggttaccggcattaagatgctcttttatggctttaatgagtgttggagagagtccggttgtgagcggttgcccttttaggtcgattaaatgctctgtggcaggtttagcatttcccgcccgttgcgttaacgtcagttgttgatattttttttgtgcaacgttatagctggtttcaatcgatggggtggcagtgcccatcacgataggaatattttcttgcttggcgcgaaagaccgctaaatcccgtgcatggtaacgccagccatcttgttgcttataagagccatcatgctcttcatcaataataataatccctaattgctgaaaaggggtgagcaatgccgagcgcgtaccgataataatggcattatctccccgtttcgctcgtagccataccgcaaggcgttccgtatcgttgagtccggagtgaagaacatcgacgggggcattaaaacgtgctttaaaacggcgaatggtttgtggggtcaaacctatttcagggactaagatcagtgcttgtttaccttgagcgagaatagtttcaagtacactgagatacacttctgttttaccagagcctgtgatccccaataataaccaaggcgaaaattggtctgcttgtgccgtgatagcaccaacagcaaccgcctgttcggcattaagtttaaatcgttcgccttgtacggcaaaagtgctttgccactgtataggggcgggttgaataggacgtaaatccgctaatgctttcttttttaagttatttagtgtcgctgttgtaatttcatattcatctaactggtggcgatacaaaggggcacggcgtagtgccgccaaagcttgttgttgctttttagcgctttttagactgttaagatcaagcgcttctccctcttgagtggcataccattgccataagggcgtaaattcagccggtttcccttgtcgtagtagaattggcatcgcatgaaagagaacttcacctaaaggataatgataataagcacttgcccaattaagcatatcccataagatccccggaaacagagtctctgtatcaagtacttcttcaataggtttcagtttttcaatgggaaactcactgtgtgaactaaaacctttaacaataccgatagagcgacgctgtttgccaaagggaacgaccacgcgacaacctattgttggcatggcacaaccttctggaagcaggtagtcaaaggaagaaaacagtggtacaggtaatattacctgaactatagtcatatcagggtttccgagtgttttagcgaaaagatagtattaagaatatcacaaaaagtgtgcagatttcattgcgcgtttggcggatattctgtatgatccgccccctttggtagataaaataccaaacaatttaattcaatcaacacgacgtgtggtgttcggctgagggctgaatagcgacacggccttagcagaggttttccatgaaaaaagatattcatcctaaatacgaagaaattactgcaacttgttcttgcggtaacgttatgaaaatcaactccacagcaggccacaacctgaatctggacgtttgtgataaatgccacccattctatactggtaaacaacgtgatgttgcaaccggtggtcgtgttgatctgttcaacaaacgtttcaaaatcccaggcagcaaataagatatttgttaccacaacttttcaggtaacactgaaaacgtgtagggaaaacggaattgaagaaagcccaaagtatttgctttgggctttttgttattctttatcgtctaaattatggtcactttgtatcatactttaaccgcttgatttttttattgatagtaagctttccctatctctattcatcacctagcgtgatctcccaatgataaaataacatatcgaatatacctcaaagcgatagcgctcttttgtatgcgttttttatgtaatatcgtcgccaatgttcgcgcttttaatagtgacaagacagatcacagctattcataatcctattcacttatctattcattaacctatttataagtagcgaatatcatgacacaacgagcagaagttatacgaaaaatactacgtaatggatctgagtcagcaaggtaactagctaatattatgaatattagtcagctaaccctgtctagagcattaaaaatgttgtctaatgatattgttcaaattggctcgggtcgttctattcacttatctattcattaacctatttataagtagcgaatatcatgacacaacgagcagaagttatacgaaaaatactacgtaatggatctgagtcagcaaggcaactagctaatattatgaatattagtcagctaaccctgtctagagtattaaaaatgttgtctaatgatattgttcgaattggttcgggtcgttctattcaatatgctttacgtgatggtttgcgtggcttcaactctgtaactatttatcgcataaatgaagaaggtaaaattaaattgttgggtaaatgacaccagcttatccagccggttttgttatgaagcgagttcgcgtatctctcgtctagagtaatgcacaaattgaagcccaaagtgttggctttgggcttctggttatatttttgctatcaaaaataatttctgatcaatattcccaagtctcgggatcaacaccccgctggcgcattatttcttttgcctcttcagggatttcatcgttacgctctttgcgtaagtcttcatcattggggagaggctgtccggtaaatgcgtgtaaaaatgcttcacacaataattcactattggtggcatgttttaggttattgacctgacgacgagtgcgctcatctgtcaaaatttttagcactttcaatgggattgaaactgtaatttttttgacttgttcgctttttttaccatgctcagcgtaagggctgatatattcaccgttccattcagccatggattaccttaattaatatcatttagttgaagccagtttagggttgatgccctattctgacgagccatgccagtttatcatgacttttctaaaaccaccgactgttactggctaaaggtgtgagaaaaagcaatagttacctggcgatatccttaatatttatattattccatttgttggtctatccgtaaaggagtttagatgtctagatgtattgacgtcttggtgtctaattggatatgctgtaagcgacttttccacttagcgctgtaacaaggtgtctgtatgacgaagaaaaccgcaaccattgccattcacaatgggcttaatgaagataagcaatatggctgtgttgtaccgccaatctatctttctagcacctataatttcttagcatttaatcaacctcgtgaacatgattactctcgtcggggcaatccctcgcgcgatatggtgcaaaatgcattagcagagcttgaaggtggggtgggagcggttgttactagcagtgggatgtcagcaattcatttaatttgtacgacttttttaaaaccgggtgatgtcattgtggcgccccatgattgttatgggggcagttatcgtctgtttaatagtcagcagcaacgtggtgcttatcgtgtggtatttgttgatcaaaacgatgagcaagcgttacaacaggcgttggcattagcaccaaaaatagtatttattgaaacacccagtaatccactattgcgcatcactgatattgagaaaataagccaattagctcaccaagttggggcgttggtggtggcggataacacctttatgagcccggtattgcaaaagccattggctttaggggctgatttagtggtgcattcttgcactaagtatcttaatgggcattctgatcttgtcgcgggtgttgtgattagtcagtgtaggaaacagcttgaggatttaagctggtgggcaaataatattggtgttactgctggggcgtttgatagttatttgttattacgagggatcagaaccttagtaccacgaattcgattacaacaagaaaatactcaagcattggtggcttatctacaaacacaacccttagtggataaaatttattacccagcactagaacatcatgtcggtcacgcgatagcgaaaaaacagcaacaaggttttggtgcgatgttaagttttgagttaaaaggggggattgaagcaattaaatcctttttatctcatttaacactctttacactggcagagtctttaggtggtgtagaaacattaatttgtcatccggcgaccatgacacacgcaggaatgtctgaagaagcgagaaaaaccgctgggatcagtaacgctttattgcgcatttccgtggggattgaggatagtctggatctcatcaacgatttacaaaatgcgtttaatgcagcaacgaaaaggtaaccatggatcatgagcgtagtggcgattaaacaacaggcgcaaccaacttgccgtcagttacataaattcggtggtagcagtcttgcagacataaaatgttatcagcgagttgtgaatatcatgacaaattatagccaacctaatgatttaatggtggtttctgcagcaggctcgacaacaaatcagctgattaactggttaaaattgagtcaaagtgatcgtatttctgcccatcaagctcagcaagaattacgtcgttatcagctatccttaattgaaggactattatcaaaagagcatgcacaagctctttcacaggcctttattgctgatttagaaagactaagttacttacttgataagccgataacggatgcaacttatgctgaagtcgttggtcatggtgaaatttggtcagcgagattaatggcaagcttattaacggagcagggtttacctagtgtgtggttagatgcgcgagagtttttatgtgcagagcgcgccgcacagcctcaagttaatgaagccttatcgcgtcctttgttacaatcattgctggctaaatatcctcaatgtcgctttgtggtaacgggttttattagtcgtaatcaacaaggtgagacggtgctattaggccgtaatggtagtgactactcagcgacccaagtaggtgctttagctgatgtgggtaaagtgaccatttggagcgatgttgcaggggtttatagtgccgatccccgaaaagtgaaagatgcctgtttgctaccgttattgcgtttagatgaggcgagcgagctggcaagattagcggcgcccgttttgcatacacgcacactacaacccgtctcagggagcaatatcgatttacaattacgttgcagttaccaaccagagcagggttcaactcgaattgaacgggtattagcatcaggcacaggggcaaaaattgtcactagccatgatgatgtttgtttaattgagcttcaattagccgcacatcaaaattttgaacaaatcgctaaagaagtggatgcattacttcagcgggtacaaattcgtccactggcaacaggtattgatagagatagtcagttgctacagttgtgttacaccagtgaagtcgctaatagtgcgttagatgttctgcaagatgcggccttaccgggtaaattacatctgcgagagggcttttctctcgttgctttagttggcgccggggtatgtaaaaatccactccattgccaccgtttctaccaacaacttaaagatcaaccggtagagtttatttggcacgcggaagataacatcagtttagttgcggtattacgtaactatacggcttcattattgcaaggtttacatcaaacattatttagggcagaaaaacagattggtttagtgctgtttggtaaagggaatattggctcacgttggttagagctgtttgctcgtgaacaagagccattatctgcacgtagtgattttgaatttattctggcgggggtggtagatagccgtcgcagcctactagatcaccaaggtattgatcctagtcgcgcactggccttttttgatgatgaagcaacagtgcatagtgaagagtcgcttcatttatggatgagatcgcatccttttgatgatttagtggtggtcgatattaccgctaatgaagagcttgccgcctgttatgaagattttgccagctatggttttcatgtgattagtgcaaataaaatcgctggctcggcatcaagtttacgctatcgcgcaactcgtgatgctttctctaaaacaggacgccactggttatataatgcgacagttggtgcgggattacctattaatcatacggtgcgtgatctacgtgaaagcggtgatacgattttatctatcagtggtattttctccggcacattgtcatggctatttttacaatttgatggcagcgtaccttttagtgatttggtagagcaagcatggcaacaagggctaaccgagcctgatccgcgtatcgatttatcaggacaagatgtgatgcgcaaattgattattttagcccgtgaagctggctatgatattgaacctgagcaagtccgtgttgaatcgctggttcctgctcaagcgcaaagtggatcattagaagccttctttgaaaatagcagtgtgattaatgaacaaatggcacaacgtttagcggctgccaatgagatggatatggtactgcgttatattgcgcggtttgacgctaacggcaaagcgaaggttggggttgaagcggtgagaaaagatcatcctctggcatcactattaccgggggataacctatttgctattgaaagccgttggtatcgtgataacccattagtcattagaggtcctggtgctggacgtgatgtgactgcgggggctattcagtctgatctcaatcgcctttctcaactattgtaaaagactattttctttttaatcaaaactatcagtgatttttttattgctgatagttttctgtgtatttttttctcttctatactgaaaaagatgatgattaattgtgtagatagagaggaaatatgaatagaattgttgaaaaatggatgtatcgctctcgttggttatttgcacctgtctatattggcttatctcttggattgttggcattaacgattaagttttttcagtcaatgtacgagatcttacccaatatatttgccttatctgaagctgatttagttttacgtttattatcgctaattgatttggcattagtgggggggttattgataatggttattttctcaggttatgagaattttattaccaatatggaaatcgaaggcgcgaaggataaactctcttggttaggtaacatggatgcagaatcgctgaaaaataaagttgctgcttctattgttgctatctcttctattcatttgttaggggtgtttatggacttaaaaaatatccccgataacaagttattatggtatgtggtgctacatctgacttttgttttttccgcttttgtgatgggctatttagagaagatctctaaacgaagtaagcgagcaaataaagccaatcaagggtgataaaatgagagctacagcacgtcgttatttttaaccttggctatacttagatcatctctagtcacaaaggagcgattaatgtcaaaaattgaaaaacatgttgatcagctaaaagataaagcgacggaggtgaagcatcggacagaagaaaaattatctgaagttgcccacgatttaaaacatggtgcatctgatcttaaagaaaacgtagaaaaaaagattgattcattgaaaaagtgaatgtgctatttgttaacacaaggcgctgcatagtcagcgccttttctatttaaggggtatcgatagggtgaaattggagaaaaaacaccagacaatttatcaatattaaaaaaattcatctaaatttttcgccagataaatttttacttatttcaccctttctagtaaaaaacgcttcttagacgataagaaacaaaaaaatgtccttattatggttaatattgagcaaaaacaacgtcgatattagccattcttataacactaaagccgtaattaaatttcagaaaattcccccaaaacgcttattttctgatatgaatagtaggctataagtaaaaagcagtgtggcttatcacaaaaatcacaataaagtcacataaaaaatgaaaattaattacacaactggaaggacatgactttttcttagtaaaaagtatgttgttaccgacacaaagccaaggtcaggagtcttatgaatcaacaatattctgctatgcgtagtaatgtcagcatgcttggcaaactactcggcgacacgataaaagaggcactcggtgaagaaattttagataaagtggaatctatccgaaagttatctaagtcatcacgagcaggtaatgaagttcagcgacaaaagctactattaaccttacaaaatctctctaatgatgagttattacctgttgctagagcattcaaccaattcttaaacctgactaatgtggcagagcaataccatagcatttctcctcatggcgaggcggcaagtaatcctgtggcattggctaaattaattgaacggctgaaagataaaaactttactaatcagcaactcaaacaagccgttgaacaaatttcgattgaattagtcttaacggctcatccaacggaaattgctcgccgcacgcttattcataagctagtggaagtcaatacttgcttatctcagcttgatcatgatgatcttgccgattatgaacgtaccaatattatgcgccgtttacgccaattggttgcgcaatcgtggcataccgatgagatcagaaaaattcgcccaacccctattgatgaagcgaaatggggttttgcggtggtcgaaaatagcttatgggaaggtgtgcctgctttcttacgtgaatttaatgaacagttagaagagtctattgactacaatttaccggtagaagcttctcctattcgctttacttcatggatggggggagatcgtgatggtaacccaaatgttaccgctgaaattacccgtcatgcattattacttagtcgctggaaagccgccgatctatttttaaatgatattcaggtgctcgtttctgagctgtctatgacagaaagcacaccagaattacgcgaattagcgggcggtgccgatgttgccgagccttatcgtgaaatagccaaacaattgcgcactcgtttacaagtgactcgtgattatttagaacaacgtatcaaaggtcagcaatcattacctcctgaaggcttactgattgataattcagcactttgggaacctttatatgcttgttaccaatcactgcatcagtgtggtatgcgcattattgccaatggacagttattagatactttgcgccgtatccgttgttttggattacaactggtgcgactcgatattcgccaagaaagcactaatcataccgaagcgctgtctgaattaacgcaatatttagagcttggtgattatgctagttggtctgaagagcaaaaacagacgtttttactgacagaacttaactctaaacgcccattgatccctactcattggcaaccgagtgaagcaactaaagaggtatttgaaacctgtcgggtaattgctgagtcaccaaaagattctattgcttcttatgtgatttccatggcgaaagtcccttcggatgtattagccgttaaactattactaaaagaagcaggggcagatattcgtttaccggtagcaccattatttgaaacgttagaagacttaaataacgcagaaagtgtgatgacccgtctgtttgatattccgtggtatcgcgatttaattgataacaaacagatggtaatgattggttattctgactcagcgaaagatgcgggtgtgatggcggcatcgtgggcacaatatcgagcacaggatgctttaattaagttatgtgagaaatctggcgtgacattaacgctatttcatggccgtggaggcactatcggccgtggaggtgcgccggcacatgctgcattattatcacaaccaccggggagtttaaaaggtgggttgcgggtgacagagcaaggagagatgatccgctttaaatttggcttaccgcaagtgactatcagtagtttggctcactatgctggtgcgattttagaagctaatttattgcctcctccagagccaaaaacagcttggattgaggttatggatgctttatctgatgtatcttgcgagatgtatcgtggctatgtcagaggtgaaaaagattttgtgccttatttccgagcagcgacgccagaaggtgaattaggtaaattaccattaggctctcgacctgctaaacgtcgtccaacaggaggcgttgaaacattgcgtgctattccgtggatcttcgcttggactcaaaaccgtttaatgttacccgcatggttaggggccggtgctgctttacagcatgagatagataacggaaaacaagccgtattggatgatatgtgtgagaattggcctttctttaatactcgtattgctatgctagagatggtgtatgcaaaagcggatctatggcttgcggagtattacgatcagcgtttagtcgaagaaaatttatggccattaggggcgaaattacgtcaacaactctctgatgatattaagagtgtattagcgatttccaaagatgagcatttaatggcggacttaccgtgggttgctgaatctatcgcattgcgtaatgtttatactgatccacttaacgtcctacaggcagagctattgcaacgctctcgtactcatagcgagtctgatccacgtattgaacaagcgttgatggtgactatcgcaggtattgcagcgggtatgcgtaataccggttagtggtcgcaatagggttattttattagtaaaacagcgctaaatttagcgctgtttttttatctttttttccaacggtgccaataaagaacgcaataaacacggcaaataaaccaacgttgatgccaattttgggcgcctttattaagggctggaaaaaggtgataagtactaaattgctgtgcaatgatggcttggttttttgtatcacagcgtttacgaaaaagaataaagaaactgccaagttcacgtagtgcttgttggcgcaacgcgttggctaatagtggttgatgttgtttatctgcaagctgcaagagttgtataacgatttgcaaataactttgtgcgcgcttggcttctttttgtggattaggtttacgcgtaatagagttaggattagcgcaatagtaataaagaggttgatcatcaaaggcgatacgttgagtgaccagtgcaagttgtgtcgtccacaaaatatcttcatgataaaggccatcaataaagcgtaggtgatgttttttgattatttcgtggcgaataaattgtaaccaaacaaaatgtggccattgatgttgcgtaacggcatggatcacccactcttggccgctgatcacttgttgataaggttgacgttggtggatggtagtttgatgcttttgtggattatgtacatcatagcgttcaccattgcctattaatacatcgatatgttgttcgcaggctaattgatgccaatgtgccagtaattgaggtttaataaaatcatcgctatcaaaaaagactatccaatcaccttgagcatattttaagccagtatttctcgcgctagataacccttggttagtttggtgataaaggtgaaaacgattatcttgttggcaatagagcatagcgatgtcaacactattatccgttgagccatcatttataatgatcacttcaaagtcgtgaaaggtttggcaaagtaggctctctaataatcgcgtaatgcgagatgcctcattaaacataggaacgataacagaaataatcggtgttttcacaatagcccgccaaggattgagagataatatcgcgctattttacctttttttggcctcttcataagacgcaattgcagttactcgtgctttggcgtgatcaacaattggttgtggataatcgaggtagtgacctgttttgattgcccattcagaaggagtatggatatagcgatctgggacatcagcaagctctggtagccagtggcggataaactcaccatcaggatcaaacttacgtccttgggttgtcggattaaaaatacgaaaataaggtacagcatcagtgcctgttgatgcagcccattgccagccaccattatttgacgcgaaatcaccatcaattaattgtgacataaaataattttccccccagcgccaatcaattaatagatctttgactaaaaaacttgccgtcagcatacgtaagcgattgtgcatccagccggtttgattcagttgtcgcatcgcggcatcaataataggaaagcctgttaagccctgtgtccaagcggtaaattcagtttggtcattacgccagcgaatattttctgtccatggttgaaaagctatctgtttggataaactcgggttagcaactattagatgttgataaaactcgcgccaaactaactcattaaaccaaacaaatgtactggaatggttattttctaagaaatcaggctctgtttggtaaaggcgattaaaacattggcgcacagacactaggcctatggcaagataaggggataattgactggttccatcaatagcaggaatatctcgccattttgcataatgtatcaccctttcatagcaaaactgttttaaacgctgtaacgctgcttgttcgcttgctgggaacatcttggttgatgatattggtagtgcaaaaagtggtgcacttaacggtgaaacggctttttggtgtgctcttatttcgggggcaggtaatgaagcattatcttgcgatagaaatagccgtaaaaatgcggttctaaaaggagtaaagactttgtacatctctccttgttgggtcacgacattccccggtggcacaaaaacgttatcgtggtaacaataaaccgtggtgttatgggcgagtaattccattacttttttatcacggttttgctcattaagcgcatattgatgattaaaaaatagcgcagtgacctgatgttgctgacaataatccacaatactttgtgccgcatcagcatatgtatcactgatgataagtgtcagtggaatatttaatttagctagcgcatgggaaagattaagcaatgcatcatgaataaacgcctgctgtgataaagccatatgatgggctttccactgtgcaggcgtgacggtaaaaatggcatgtacctgcgcctgtgtattttggcaagcataaaagagcgctttattatcggtcactcttagatcatgacggaaccaaactaaatgaacaggcgctgagtgcatgtaacctctcttaatctaattttggatgttgatcgataagcgcttggcgttttttctgtaatgcttcaatttccgcttcgatatcttcaacacgttgttcgatattgtcatagtgctcagataaaatctctttcgcttctgatttatctgatgctgccggtgttgctccacgtaatggtttgttggctgtttcaatcatttttatacccgttatcaaaccgacaacagcaactaccattagataataggcgggcatatataaattgccagtcgcttcaactaaccaagccgctgcagttggtgtggcaccagcaattaataccgaaatattaaatgcaatagctaaggcactataacgaatatgggttgggaaaatagccggtaaaatagaggccatcaccccagtaaaacagtttaataaaaccgcaagaattaataatcctaagaaaattaagccgatttcatcactgttaatcatcataaaggccggatatgccaatataaacagtccaacgctacccccgataacaaaaggtttacgaccaatcttatcactcagtaatccaatcacaggctgaacaaatagcatccctatcataatcgcgatgatgatcaagaccccatgatcggcggaataatttaagttatgggataaataacttggcatataggttagcaacatgtagtaggtgacgttggtcgcaatcactaagcccacacataccgttaaacttttccaatacttggaagcgatttctcgtaatgaaacacgtggcggattttcgatagatttacgatcatcgctgttcatttcatcaacatgttgttggaaggccggggtttcttctaaggcatgacgtaaatataagccaatcagacctaaaggtaatgccaagaagaatggaatacgccatccccactcatggaatgcagcttcacccataatggttgagataaggacaacaacacccgcccccataacgaagccggcaatagagccgaaatctaaccagcttcccataaagccccgtttacggtctggtgaatattcggcaacgaaaatcgccgcacctgagtactcaccaccaattgagaagccttgggctagttttgctaataacagtaagacgggtgcccaaatcccaatggtgtcatacccaggaataagaccgatagcaaaagtacttaatgccataattatgatggtgacagataagactttttgtcgtccaaacttatcccccaacataccaaatacaaccccacctaatggtctaacaaggaatgggactgagaatgtcgcaagtgctgcgatcatttgtacgccaggtgatgcaccagggaaaaacacttgacctaatacataagccaagaagccatatacaccaaaatcaaaccactccattgcattacctaacgctgccgcagtaatggcttttttaagtttgctatcatcaataatggttatatcattgattcttaatggtttatttctttttttcttcaatttcatattaagtgacctttcaattaaggtattagtaaattgttgttattcaattaataattaaacgaaatgaagtgactattttatagcgagaaaagagagtggtaataattcactaaaaaacagtttacttctacatagttaaatagtgagggtgaactaatagcttatggaacacttattaagtatagatgaggttaaatgaaagattagggattttttgtcgttgttttgatataacaaaacgaagcctctaagtaaaaaatgtgacctatatcatagctgaatatggcttttgtgtaaaatccatgatgttaatggttgtaaatttgaattaagttagatgaagatggcgataaaaagctaatagtaaatattattatataacaatgggttatgttggttttttattttttgattagaaataatatattgatagtcaaattatgcataataaatagttaatatctgctttaatgtggatgaaatcatctattattcgttgtgctaaaacacagaaataaaaacagtcattgctagatttggtgcagtcacttttctattctagcaaatagataaggtaagtcagtggataattaagtagatatcactattcttattaagagagcaaaaagagaggagatgtcataatatccactaggcataagagcagataatttgagtaatgcattgtagtataaatattaacaataattatttttataaaatcaataattaacggcatgcttgtgccaattaacccaggtactcctcatgaatattaatcaactgaaaagctttgttgaagtagtgcgaaatgactttaacattacgaatgcggcagagaaactctatacttcacaaccaacgattagtaagcaacttaagatattagaagacgaactcagtgtttctttattcgtccgtaaaaataataatttattagcacttagtcctatggggaaagaggtccataaaatagctagcgatattcttggacaggttgataaaattaaaagtattgtggcagaagaagatcgtaataaaaaagtagatttgcacattgccacaacacatacgcaaatacgttactccttacccaacgtcattgatcattttcgccgctattaccctaatatttcactccattttcaccaaggtgctcctgctcagttagcagaaatggtaaaaaatggcgatgtcgattttgccattgccacagaatcgatgcatttatatgaagatttaattactttgccttgctatcgctggactcgcagtttattagtaccttatgatcaccctcttgcatcattacctgatgatcaacaggttaccattgaacaacttggccaatatccccttattacctatgtgtttggtttcactcgaggctctaaactcgataaagtgttttataaaaaccatcttaaacctcaagtggcattgacggcgacagataccgaaattattaaatattatgtcaagcgccaccttggtattggtgtgattgccacggttgcttatgatgaaatagaagatagccaagcattaaagtgcatcaatatcgatcacttagtacagcccagttatacacatatatgcctaagtaaacatacgcatatgaaagattatatgcatgagtttatttcactctatgctccgcatattgatagaaatattattcagatgccagagcagtgggaaacccagtggcatagcaaagaagtgtatcaggggttacctgatctgatttcggtaaatagcaaagagaaaataatagaataaatcttcagttaagatgagggactaaaaagcccgtttttgcgggggcaaaaaacgggcttagggcagaataagtaattatttgcgagttagcagattaacaaaaatctgtgcacccactaataagcaatcatcatcaacaaaataaggattagcatgaaggtagttattgatacctttagcttgattaccactgcctaaaaagaacattgcgccaactttacctttagtggcattcaccatatagctaaagtcttcactacccgtcattggtttaccgttagattcgatattctcttctggtaaaaattggcgagtggcttctagtaaacgctgataagccgtaggatggttaataacagcagggtagcctgttgctgttaatgttgttttaaatccacccgctgtactgcgcgctacgatttcattaaagctttcttttaatactttgtcggtattttcatccatagagcggatagtaccacgggcttgaacgtgatctgctaacgcattaggaatagtaccgccattgatcatgccgcaaccaaataccgcagggctaaagggatcagtttttttggcaaccacataatccatataatcaattaagcgagttgcttcacgaatagcatctaaacctttatgcggtgtagatccgtgcgcagaaacaccataaacatctaatgtccatgctgagccgtaagatgacatgacaccatcattaaaacgtacacaaccggtttcgatagctgcatcattatgtagtgcgtaagtttcatcaacgccttccatgcaacctaactcaaccattttgtcagcaccaggaacacgcatatcctcttctgccatttggaaaataaaacgcacattagcgctcatttctgcttggttttcagcaaggtatttagcggccgttaatgcaatggtcatatgagtatcgtgaccacaattatgtgcacaaccttgatggatagagctgtgttcgttgttcgttaagtctggcatttctaatccatccatatctgcacggatggcaatcagtggaaaatcagcattaacaattaaatcggcagtaaatccagtatagccatcaaaggttttaatttgatagccaaagctttccatcaattcacggcaatactttgatgttttatattcttcacctgataactcaggaattttgtgcagatcttgtcgtgtttttttactaaagtcatttaattgaaagagtttttcgctgacattataaatattattcattagataactccctggatagtaaatccaatttgtgcgacgattgatgcgccgaagaaacagcaggtagaaacaatcatgaaaataaggatcactttccatgacattttcttcagttcttctaattggccaccaacggataaaccagcaaatgctaataaaggtacacaacaagataagaaagagactttaccgatagaactaataaaaaactctcttacaggtgtttcaggtaaacaaataagtatcccgataatagttgcataagcaaatgttggtagagatgaaggtaaatattgtttagcaacgagtgaaataaaaaccactacagacatagcaataaagctatcccacattgcataaatagcaatccctgatgttaacgtttgagtaaacattgccagtaaaatagcaacgaatactaatttcatatctataattatatttttcatgcagttttgcctctggtgaaaactttataaattttttctgaaagaggtaaacctaaataggttaatgagagtgcgccaagtgcagaagataataagttagatgcagccgcaacacttaatacttgttgtgctaaagcttcgtctaaaccgttaattaatgcccctgatgcagcacttaacattgaacctgaacctacgccggagcctgctgctagagcaagtgggtgtaagcctgttaatggtgcaagactacctaatacgctaaaccataaagtcccgataacagaaccacataagtaaatagctaatacaccaatatattcttgtgagccagtcccaaatctaccttgaataacggcgatagaaggttctcgactaatagatgaacatgcaccaattgcacggcgaccaaaaccaaatttaatggctaatggtacggcaattaatactggtaataagtttcctagctcttgaacaaataaaggaataccgacacttaaaatcatttttatatttgggacgatcatgccagcatattgcgtacctaaaataagtaggctgaaacctaccattttaccgcagaagccttcttctttttctgtaaataatttaccccaaactttaatttttttgcgggtaaatccagccgacataaacataccaataataactgcaaataacattggtagaataggaatgactgcaatgccaatcttaatttcttttttaccaatcacatattgtgaaataaaaattaagaaaaggactgccagaatactaataaagaaaacctttatcggacttctacttttgtccatccgttaatctccgtagaaaaataaacaggctttattctagaggacaaaaagcaaaaggtagcgtgaccaatgtcatgtttacttcatacctctttttcatgggacatgaaataaaataatagtaataaatttattaacaatttgagttaactgaaattattgaggaaagacagagagtaaggctgaaatgtgtcagctatattgttaaataaaatgatagtagaaaaagagcaattaaaaattagtttaattattaaaataatcctataagtttattttgtctagcacttgatgattttaatacaatataaatgagatagattcttatttaatgcgaaatgagtcataaaagcgataagtgcgtttatcaatagtattattttttatagttaatttcctttattaattgacctatctaccgtgacaatcaatcaagagatgttattcttaatatttgatttaataacacggtattctctatatgatgtggtaaaagagtcggttgttatatctggggcagcatgtagagagattacccactaaaataaaaaggaaatgcgtcacatgagtaagcaaacagttgcaacctatattgctaaagtgctccataatgcaggtgtgaaacgtatttggggggtgacgggcgattcattgaatggattaagtgatagcttgcgcaaaatgggtaccattgaatggatgggcacacgccatgaagaagtcgcggcttttgccgccggagcagaagcggctatcaatggtgaattagccgtttgtgccggctcctgtggaccaggtaacttacacttaattaatggactttttgattgtcatcgtaatcatgttcccgtgttagcgattgccgctcatattccctctgctgaaattggtagtaattactttcaagaaactcatcctcaagagttgtttcgtgaatgtagtcactattgtgaattagtctctaatcccgatcagatcccacaaattctggctatcgctatgcgcaccgctattttgaaaaagggtgttgcggtggtggtattacccggtgatgtagcgttaaaacccgctccagaagatgcccatgaaaattggtatccactacaatcaccactgattatgccgaatcgttttgaaatcgaaaaactttctgaggcactgaataacgctaaaaatatcaccttaatgtgtggtgccggttgtgctcaagcacatgatgaagtggtgaaactagcacaaaccttaaaagcccctgttgtgcatgcactacgtggtaaagagtatcttgagtggaataatccatgtagcgtgggaatgacgggtcttatcggtttttcatcgggttatcacgcaatggagaatgccgatactttagtactgttaggtactcaattcccttatcgcgctttctatcctgccaaagctaatattattcaaattgaccttaatccaagtagcattggctcacattgccatgtggatatggcttttgttggagatgtcaaagcaacccttaatgcattacaaccgcgattaaaagagaaaacagataccgcacatcttgatgcctcgttaaaacattatgctaaagcacgcaaagatttagatgcattggctcaacctagtgagcgtgagttgatccaccctcagtatttagcacgtcgattaagtgaattagccaacgatgatgcggtatttacctgtgatgttggcacgccaacagtttgggcagcacgttacgtgaaaatgaatggtaaacgtcgtttaattggttcatttaaccatggctcaatggcgaatgcgatggcgcaagctattggtattcaagcactggacagaaaacgtcaagttgtggcgatgtgcggtgacggtggttttaccatgttaatgggtgatttcatctcattggctcaaatgaacttaccggtgaaagtggtgatttttaataacagcgtattaggttttgtggcgatggaaatgaaagcggggggctatttgactgatggcaccgatttacataatcctgattttgccgctattgccaatgcggcgggaattaaaggtattcgcgttgagaaaggcgaagatcttgatgaagcattaaaaacagcctttgaacatgatggccctgttattgtggatgtggtaaccgcaaaacaagagctttccatgcctccggaaattaaatttgagcaggccaaaggttttagcttgtatatgatgaaagcgattattaatggtcgtggcgatgaaatagtgcaattagcgaaaaccaactggttgcgctaatcattaaacgcataatcgttatattgcgagttgcaggggctaatagcctacctgcaacttgcatttcaacataagtcgataggattttttattatttcgctttctctgctaaacaaaagttttcaattaattgccccattaattcacgagttggctcaataaaagccatatcaataaactcatcaggctggtgggcttgttcaatggagccaggaccaagcactagcgtagggcatagcgcttgaataaaaggtgcttcggtacagtaattaacagtttgcgctttctcacccagtagtttttcaatcacggcaaccattttatgatcggtcggacactcgtagccgggaataggctcgtgcaatgcttcgacacttaaacgtcccggccagcgcgcttttaccggggctaatgtttcgtgcagcagatcatcaagatcttgcagcgttaatcccggtaatgggcgaatatccatatgtaattcacagcaagcacaaattctattagcagcatcaccaccgttaatataaccaaagttcatggtgggatagggaataacaaacgccggattgttataacgggtttttaatctatcgcgcagtgtactgagatgggtgatagattcatgcattaactcaatagcgttgacacctttttccggatcactagagtgaccggattgcccagtaatacggatagcattagataaatgccctttgtgagcacgtattggttgtaatgaggtgggttcgccaataatagcaaaatcaggacgaatagcggtattagcggcaaaataacgtgcaccagccatcgacgtttcttcatctgctgtagcaagaatatacagaggatgtgtgagttgagaggtatctatatctcgcaatgcatcaataataaaggcaaaaaagcctttcatatctgccgtacctaaaccatataacttgccttctttttccgttagggtaaagggatcttgagtccaacgcccttcatcaaatggcaccgtatccgtatgtccacagagtaataacccgccggttccactgccaagggtagcaagtaggttaaatttccctctggtttcaggtactggttgtatttcaattgaaaaaccgagtgtttccaaccaattagccaacagattaatcagtgcctcgttactttggtctgtcttagcatctgttgcactaattgagggtgttgcaattaattgtcgataaagctcaataaatgtaggtaatttaatattcactgttgacagcctttcttcataatagtatcaatattcatgcactttttttgaataaaaatacattaatcggtttgtgttcatagtacaaggtaagaatgacatgttaaatactctgattgtaggagcaagtggttacaccggtgctgaattagcagcctatcttcagcagcatccccatgtaaatttgagcagactgatggtatccgctcaaagtgtagatgcagggaagtgcttttctgagctttacccacaatatcgtggcttagttgatttgccacttgagcctatggtcgatgttgctaatgccgctgaaaatatcgatatcgtttttttagccaccgcacatgaagttagtcatgacattgcccctatttttctcgctcaggggtgtgtggtgttcgatttatccggcgcctaccgagtacaaaataaacatttctaccaacaatactatggattcgagcataagaatactgattggttatcacaggcggtttatggtcttgccgaatggaacgctgatcagattagtcaggctcaacttattgctgtgccgggttgttatcccaccgtttctcagctgtcgttaaagccattagttgaagcgggattattagacagcactcactggcctgttatcaatgccaccagcggtgtaagtggcgcaggcagaaaagcgtctttaacaaacagcttttgtgaagtgagtttacaaccttacggtgtttttacgcatcgtcaccaaccggaaattgctactcaccttggcattgatgtcatttttactcctcatcttggtaattttgctagggggatcttagccactatcacctgtaagttaaaacaaggtgtcacagaaaatgaggtaaggcaggcatttgaaacagcgtatcaaggccaaccgttggtacgtgtgtatgacaaaggtctacctgcattaaaagccgttgtcggtaccgccttttgtgatatcgggttagcacaacaaggtgagcatttaattattgtcggtgcggaagataacttattaaaaggggccgcagcacaagcggtgcaatgtatgaacattcggttcggttttgcaccaaccgaaacacttatctaaataatgagtagggacgttttatggaaccattaattatcaaactaggcggtgtactgctagataacgaaaaagcgttaacacgtttttttacagcactacaagaatatcgtactagtcatagtcgtccattagtgattgttcatggtggtggctgtttggttgattctctgatgaaaaagctgcaattgcccgttgttaaaaaacaaggcctacgagttacccccgccgatcaaattgacattattactggcgcgttggcaggaagtgccaataaaacattgctgtcatgggccacacgctttggtttaaatggtgtcggactttgtttgggcgatggccaattagctaaagtaacaaaaattagtgatgaactaggtcatgtaggaaatgctgaacctggctctcctgagttattaaatctattactgaatgcagggtatctcccgattattagttctataggtgtgagtatccaaggtgaactgatgaatgttaatgctgaccaagcggcaacagcgattgctgaaaccttaggagcagatttggtgttgctctcagatgtaagcggcattttggatggcaaaggacaaaaactcacagaaatatctgccacaaaagcgcaagcattaatcgaccaaggcattatcaccgacggcatgattgttaaagttaatgctgcgttagaagcggcaagaacgcttagacgtcctgttgaaatagccagttggcgtcacgcggaaaaactgactgatttatttaatggtatggtgatcgggacacgtattttagcttaaacacaaccacataacgctttgtatattggcgaaataaacacaattgagaataaaggttatcactatgacgaaaggtattaaaaaaattgtactggcatattcaggtggtctagacacatcggctatcatcccttggttaaaagagcattatgacaattgcgaggtggttgcgtttgttgctgatgtgggacaaagccgtgaagatctggaaggtgtagagcaaaaagcattggcgtcaggggccagtgaatgctatgtggttgatttacgagaagagtttattaaagactatgtgtatccagtattaaaaacaggagcattatatgaagggagctatttgttaggcacttcaatggcacgtcctgtgattgctaaagcacaagttgaattggcattaaaactcggggctgatgccttggcgcatggcgcaacaggtaaaggtaatgaccaagttcgttttgaaagtacttataccgcactggcaccgcaacttaaagtggttgcgccttggagagagtgggacttgcgctcccgtgaagctctactggattatctaaaagttcgtcatattccaaccacggcgacacttgagaaaatttatagtcgtgatgaaaacgcatggcatatctcaacagaaggtggagtgttagaaagtccatggaatgcttctaatgaagattgctgggcatggacggtagatccgaaaaaagcccctgatacacctgaacaggtttctgtaacggtaaaagcaggtgaagtggttgctatcaatggcaaagctcaatccccttatgagtgtttagctacattaaatacgctaggcgtaaaacacggtattggtcgtattgatattgtggaaaatcgtctggtcggtatgaaatctcgcggttgctatgaaaccccgggaggcaccattatgatggcggcactgcgtggtgttgagcaactggttttggatagagatgcttttaaatggcgtcaacagttgggtttagagatgtcttatgttgtttatgacggtcgttggtttacgccaattcgggcttcattacaagctgctgctgactcgctggcaacagaggtaaatggcgaagtggtgttagagctttataaaggccatgtgaatgctattcagaaaaaatctgacaacagcctctactcggaagagttcgccacctttggtgaagatgaagtctatgatcacagccatgcagaagggtttatccgcctatactctttgccatcacgtattcgggcattaagtaaaaagaaataaggtgagaccaataagagtgatgtgacaaaaggcatcactctatacatttttatcaagcatgacttttaacaaagacaaaataggatgtgattatggcactttggggtggacgttttagtcagcaagctgatcaacggtttaaacaattcaatgattcactgcggtttgactatcgactcgcacaacaagatatctttggttcagtagcttggtctaaagcgttagtcacagtaggtgtcttatcgcaggatgaacaagctcaacttgaacaggcactttatgagctgtctgaggaagtaacagctaatccccattctattttacaaagtgatgcggaagatattcatagttgggtagagagcaaactgattgccaaagtgggtgatttaggtaagaagttgcacactggacgtagccgtaatgatcaggtcgcgacagatttaaaattgtggtgtaaagaagaagtcgcccacttacgtcaggctattattgaattacaaaaggcgttagtggtaaccgctgagcaaaatcaacatgctgtgatgcccggttatactcatttacaacgtgctcaacccgtcacttttgcgcattggtgtttagcttataaagagatgttagcaagagatgagagccgtttagcggatgcattaacgcgtttagatgtaagtccactgggtagtggcgctttggcgggtaccgcttatgatattgatcgtgaacaattagctcaatggttgggttttgccagtgcaacaaacaatagtttagatagcgtatcagatagagatcatgtgttagagctattatctgcggccgctattggtatggtgcatctttctcgttttgctgaagatttgattttctttaatagtggggaagcaggttttattgagctttcagataaagtcacttctggctcttcattaatgccacagaagaaaaatcctgatgcattagaacttattcgtggtaagtgcgggcgtgtgcaaggggcattaaccgcaatgatgatgaccctaaaagggttgcctcttgcttataataaagatatgcaagaagacaaagaagggctgtttgatgccgttgatacttggtctgattgtttgcatatggcaacattagtgcttgatgggttgcaggttcgccgtcctcgttgtgaagaggccgcaaaacaaggttatgccaatgcgacagagcttgctgattatttagtcgcaaaaggggtgccatttcgccaagctcaccatattgtcggtgaagttgttgttagtgcaattgagcaaggtaaagcgcttgaagagttggcgctatctgaattacagaagtttagtagcaaaattaccgttgaagtttacgagatcctttcattgcaatcttgtttagataaacgattagcaaaaggtggggtatctcaacagcaggtttcttatgccattactgaggccaaaaaacagcttaatatggatgagtagttttatcccattgtataactgacagattattcaaaaaaagcagggtggctcatgaactgccctgcttttttatggacgcttaccgataataatagtttaatcaattgatatatcaccatttattgataaaagatgaaaaaatcacgttacaataacgcacgattgatagaaaaatttatcagttgttatattatctatagctattaactatcagtaataagtatgggatctgcaatgaatatccgtgatttggaatatctggtggctctagctgagcataaacattttcgccgtgcggcagattcttgccatgtgagccagccaacattaagtggccaaattcgtaaacttgaggacgaattaggcgttatgttacttgaaagaaccagtcgcaaagtactgtttacccagcagggattattgctagtagagcaagcgaaaacggtattacgtgaagtgaaagtgctacaagaaatggcatcactacaaggtgagagtatggcagggccgttacatattgggcttattcctactgttggaccttatttattaccgcatattattcccgaattacatagaaactaccctaagttagagatgtatcttcacgaagcacaaaccaatagcttattagctcagttagatagcggtaaactcgactgtgctattttagccatggtaaaagagagtgccccttttatagaagtgcctttgtttgaagagccgatgaaattagctatttatgatgagcatccatggcatgatcgcaaatcagtgccgatgggggacttagcaggccaacgtttattaatgttagaagatgggcattgcttacgtgatcaagctttaggtttttgtttccaagcaggggctaaagaagatacccattttagagcaactagtttagaaacattgcgtaatatggtcgctgcaggaagtggtattacacttttacctgatttagcggtacctcaagcacaaaaacgcgatggcgtttgctatttagattgtacttcacctaatccatcacgttctattattttggcttatcgccccggatcgcctttgcgtaatcgttatgaacaattagcagagacaatccgtgatcatatgaccgcattttatgaggctaagaaagcaacatcaaaataagcgatttaaaccatttaaagcagcaacgcgataggcttccgccatggttggatagttgaaggtggtattaacgaagtattcgatagtattgccttctcctttctgctccataattgcttgtccgatatgaattatttcagcagcgcgctcgccaaagcagtgaatacctaaaatttgcttggtttcacggtgaaaaagaatttttaagctaccgacattcatacccgcaatttgggctctagcaagatgcttaaattgtgaacgaccgacctcataggggatcttcattgcggtgagttgctgttccgttttacccacagagctgatttctggaatggtatagatacccgttggaatatcttcaattaaatgcgtttccgaggtgcctgtggtaagcgcaagtgccgcaatgcgcccttgatcataagccgcagaggctaagcttggatagccaatcacatcacctactgcatagatatgttcacaactggtttgataatgcgcattaactgccacttgtccacggctatcggttttgatcccaacattttctaaaccaagcgtatcggtattacccgttctaccattagcataaagcagacaatcggctttgactttcttaccggattttagatgaacaataacgccatcatcaacgccttcgatggtgtcgtactcttcattgtgtcgaataacaataccgttattccaaaaatggtaagagagtgcatctgacatttcttgatcaaggaatgacagtagatgatcacgagtattaattaaatcaacttttactcttagacctctaaaaatagaagcgtattcacaaccaatgaccccagcaccataaataatgacatggcgaggttcatgctcaaggtcgagtatggtatcgctgttataaatacgagagtgtgagaaatcaacatccggtgggcaataagggcgagagcctgtggcaataataaaattatctgcactgagaatatcacaagtaccatcaggataacgtacgctaattctatgatcatcaataaaagcagcttcgcctgaatacatcgtacaatgattacgctcgtagaagccttgacgcattttagtctgttgactgattaccgtgctggcttggcgtagtatttgagaaaaagaggagttgatcaggcgagattggtcgctatagagcgggttttgattaaactcgataatacgactgaccgcgtggcgtagagcttttgaagggatagttccccagtgagtacaaccaccaccgacttgatcataacgttcaatgacggcgacgcgttttccttgtttaaccagccccatggccgcgccttcaccaccaggacctgaaccgattacaattgcatcgaaatgagaatgttgcataggaagagacctgttttatacaaaacgacaacgacatattaacattagaatgaataatagcccaattgacattaggggcattagtcacactttatttagttttttatctgaatgtgtcgttatggataacggtacgtacttattttctgtaaaaatttgatatattggttataaaccacatttggattatcaggattgctgtgagtaataatattggcatcagagcgaaacaaaaagaaaaaacccgccgttctttgattgaagcagcttttagccaactcagtgcagaacgtagttttactagcctaagcttacgagaagtggcgcgagaagcgggtattgcacctacctcattttatcgtcattttaaagatgttgatgagttggggttaactatggtcgatgaaagtggactgatgctacgtcaattgatgcgacaagcacgacagcgtattgctaaaggtggaagtgtgatccgtacatcggtttctacctttatggaatttattggtaataatccgaatgcttttcgattattgttacgtgaacgctctggcacatctgctgaatttcgtgccgctgtcgcacgagagatccaacattttattgcagaactggcagactaccttgagcaagaaagtaatatgccacgttattttactgaaatgcaggctgaagcgatggtgactatcgtatttagtgcaggggcagaagcattagatattgatattgaaaaacgccaacaattagaagaaagattagtaatacaactacggatgattgccaaaggcgcttactattggtatcgacgtgatttagaaacacctctacaaaataaccccgaaataaagaaaaaaatgcatcagaaaggagataaatgatggaacaaaatcgctgtgaaaaaagcacactattactttccgtagttatcggtgttgctttacatggtagttactcaactttatttaacccacttactggaccttggtctatttttccactgattagtttagttctagctgtttactgcttataccaacgttatttaaatcaaccaatgactgatggtatgcctaagttaattttctcattctttttattagggctatttggttacaatgcttatttaaaaacctctaaccctgaaatgggctctaacttcttctcttctgtatgtattgtgattattgctctatggatctatcgtcaaattaaacagcgtaaacgtctacgtgaacaggaagaagacgctgagaaagcatcgcaagcagagcaatattaattgttatcagcttttggttgtaaacacagcgagattttgacaccagtaagtgcacttactggtgttttgtttttattggggttttagtggtaatttctactataacttctaaaactaaaagttatcttttctccaatagcacaccacattccatatgatgggtgtaagggaattggtcaaaaagtgctaacttgctgattttgtgagttttgatcagcgtttctaaattctggcacagagtctgcggattacaagagatatataaaatgcgcgagtaattcttaaccaactcaacagttttctcatccaaaccactgcgtggtgggtcaacaaaaatagtttcacattggtaatcttgtagattaatcccttctaagcgtttaaattcccttacgccattcattgcttgagtaaaatcttccgctgacatacgaataattttaacattatcaatatggttcatcgcgatattatattgcgctgcatgcactgaaggcttcgctatctcagtggccagcactcgcttaaaattacgtgcaagggcgagagagaaattgccgttaccacaataaagctctaacagatcaccggttgagttttcagtgactgatagtgcccattccaacatcttaatattgacctgtgcattaggttgggtaaagctattttctacttgacgatagatcatctgttgaccagcaacaggtaatacttcatcgacaaaatcattatcgagcataattttagttttatatgcacggccaattaattgcacatcaaacccctgagcaatcaatgtttggcgtaatgctgtcgcttcttgttgccaagtctcatcaatttttttgtgatataacaacgatacaatgattttattgcttaaggttgaaagataatcaatttgaaataatttatggcgcagtgttggtttatcttttatttctgccaataaagctaccatcatctgattaatcagttgactcgccactggaaattggtcaacgcggatacgctgcttagtctcttgatcaaacataatatgatacagagcgtcctgctcatgccagatgcgaaattctgcacgcatacgataatgttgttctggtgatgaaaaaacttccacattaggcgcattaaaaggtgccatcatcttttgtaggcgttcggtcttttcattcagttgagactggtatgtttgcgttggtaatgaattttgcatggtatctcgccttgtttttggcagtaataaagttaagcgagcgaaattgtagagatcctcatgaagatgtccagtattcttcatgttcaatttctggactcagtgaagttggcatcgtagcatagcgattcggtctccgatatggagtgaaaagggaatctggtgcaaagccagaactgacgcgcagcggtaataggatcaaggataataaaagacactgcaatgcaccaaaatcagtgctgtgggaagtcattatcttaaatgctcagagtatttaacctagagtccgaagacctgccgaacatttgtcgcatgtaaaattaagtacgcgttttatttaattttggcggcatcctgctacttatttctgttggatgcagatttcatgaataataaaaaagtattttttctttcaagtgttgctttaagtgttatgacgagcagtttcaacctatttgcacaggctgataatacattgagtgtgactgctaatcgttttcaacaacctacctcctctattttagcgccagtgactattgttgatcgtgaacagatcgatcgctggcagagcaatagtgtgcttgatgtattgcgtagaatgccagggattgatgtagcacaaagtggtggtatagggcagatgagttcagtctttgtgcgaggaactgactcaagacatgtattaatattaattgatggtgtacgtactaaccaagcagggatttctggctcttacgatatgagtcaactgcctctttctttagtacaacgtattgaatatataagaggccctcgttcggctgtttatggctccgatgcgattggtggggtcattaattttataacgaaacgccaaaatgatggtttaacgttaaatgcaggaataggaagccatggatatcaaaattacaatggttcaatacaacaaaaggtaggtgagagaaccacattatctgcggcaggtggatatacttatactaagggaatacatgcaacggatgattctgtccctgttgccgccccttttcatgacagacatggatttatgagtaaatcctattggtttggtatcgaccatatttttaatgataactttcaaggctatatgaaagggtatggttatgataatcgtactacttatgttgcatcttatcccggtaatacagatcaaagtaaaacttataatcgtaattatgaagcgggtattaagttcagtggtgattcctattttagtcaattaattacggtgtatagccaaactaaagactataactacatttcaacaaatggccgtgatggtaagggctcttctgtagataattctaaacaatataatgttcaatgggggaacacctttttaattccaagtggcatgatcagcgcaggaatggattggcaaagacaaacgattgaagcgaattcagcatcagtacctcatcaaagaacaattgataatacagggctatatctcacatctcaaaaacaacttagttcagttatcgtcgaaggcgctattcgttctgatcaccacgatgaatttaactggcatactacatggcaaaccagtgcaagttgggagttcgtcgataactatcgagtaattgcttcttatggtacggcatttaaggctcctacattggggcaactttatgcggataatcctgcatggaacacaaaaggtaatcccaacttaaaaccagagaaaagtaagcagtgggaagtgggcgttgaagggttaactcaagggattgattggcgtttatctctatatcaaaatgatattgataatctgattgcttttagagataacacttacattaattacaataaagctaaaataaaaggtgctgaatgggttggtgagatggatactggattattacatcatcaattaacattgcagtaccttgatgctagagatagtgataataaactattaagcagaagagcaaagcaacagcttaagtatcaagtagattggaatatcgcagatatagatattggaattaattatcaatatataggaaagcgctatgatacggactttaaccaatatcctacgaaaagaataaaactaggtggggtaagtctttgggatttaactgcgtcatatcctattacatctcatctctcaattcgtggtagaatagccaacctgtttgataaagattatgagacagcttatggctatcgcacgccaggacgtgaatatttcctcaccggaagctacaacttctgatgcacaatctaccgctaatcccactgtcttagtttttgactcaggggttggcggtttatctatttatcgagagatccgtgaaaaactgccggatgctcactatatctatgttttcgataatgaagcatttccttatggtgagaaacctcaagagtttattattgagcgtgtcgttcgtatcgtcagtgctgtcgcgcaacagcatgagttagcagcgattgtgatcgcttgtaataccgcaagtacagtaagtctgcctgctttacgtgctaaatttactgatatccccattgttggtgttgttcctgcgattaaacctgcagcaaaacttacctgtaatggtgtggtcggtctattagccacaagagcaacggttaagcgaccttatacccatgaacttatcgaacgctttgcgacggagtgtaaagtgcatctattaggttcagcagagctggtggagttggctgaaaaaaaactgcatggcgaaaaggtgtcatgcgatgagctacgtagaattttagccccttggcttaaaatgaaagagccaccagatacggtagtattagggtgtacccatttccctctattagaagaagagttactttctgttttgcctgatggtactcgaattattgattctggtggtgcaattgcaagaagaactgcgtggttagttgtaaatcaagataaaatcagaggttcaaaagaaattagttttgcttactgtcttaaagaagatgagtatagtgaattattaaaaccggttttagccgattttggctttaaaatgctcagaaaattggcgctttaagttaaatttgttggaaaattaaacggtcggtaaaaaaatcaaaaaaaagtgttgccagcttcacaaaactccctataatgcgccctcgttgtcacggcacagggcgctaagcgaaccggctgagagaacaaaagaaaaagtgaaaagcctgataaattagcgcttgacactgaatgaggaagatgtagaatgcacctcctcgcaacaacgcagaagaccggaaacggcagcgatagttgcactgctctttaacaaattatcagacaatctgtgtgggcactcgcagagacgatatcttctaaaaaattagatgtatcaagtcttgaagagtgactaacaagttaattcatataatgaataagctaagttttcgatttctttgagcatcaaacacttttaattgaagagtttgatcatggctcagattgaacgctggcggcaggcctaacacatgcaagtcgagcggtaacaggagaaagcttgctttcttgctgacgagcggcggacgggtgagtaatgtatggggatctgcccgatagagggggataactactggaaacggtggctaataccgcataatgtctacggaccaaagcaggggctcttcggaccttgcactatcggatgaacccatatgggattagctagtaggtggggtaaaggctcacctaggcgacgatctctagctggtctgagaggatgatcagccacactgggactgagacacggcccagactcctacgggaggcagcagtggggaatattgcacaatgggcgcaagcctgatgcagccatgccgcgtgtatgaagaaggccttagggttgtaaagtactttcagcggggaggaaggtgataaggttaatacccttgtcaattgacgttacccgcagaagaagcaccggctaactccgtgccagcagccgcggtaatacggagggtgcaagcgttaatcggaattactgggcgtaaagcgcacgcaggcggtcaattaagtcagatgtgaaagccccgagcttaacttgggaattgcatctgaaactggttggctagagtcttgtagaggggggtagaattccatgtgtagcggtgaaatgcgtagagatgtggaggaataccggtggcgaaggcggccccctggacaaagactgacgctcaggtgcgaaagcgtggggagcaaacaggattagataccctggtagtccacgctgtaaacgatgtcgatttagaggttgtggtcttgaaccgtggcttctggagctaacgcgttaaatcgaccgcctggggagtacggccgcaaggttaaaactcaaatgaattgacgggggcccgcacaagcggtggagcatgtggtttaattcgatgcaacgcgaagaaccttacctactcttgacatccagcgaatcctttagagatagaggagtgccttcgggaacgctgagacaggtgctgcatggctgtcgtcagctcgtgttgtgaaatgttgggttaagtcccgcaacgagcgcaacccttatcctttgttgccagcacgtgatggtgggaactcaaaggagactgccggtgataaaccggaggaaggtggggatgacgtcaagtcatcatggcccttacgagtagggctacacacgtgctacaatggcagatacaaagagaagcgacctcgcgagagcaagcggaactcataaagtctgtcgtagtccggattggagtctgcaactcgactccatgaagtcggaatcgctagtaatcgtagatcagaatgctacggtgaatacgttcccgggccttgtacacaccgcccgtcacaccatgggagtgggttgcaaaagaagtaggtagcttaaccttcgggagggcgcttaccactttgtgattcatgactggggtgaagtcgtaacaaggtaaccgtaggggaacctgcggttggatcacctccttacctaagagatacgtgttatgtgcagtgctcacacagattgtctgatgaagaacgagcaaaagcgcgtctgcgaagctgacagaagtccccttcgtctagaggcctaggacaccgccctttcacggcggtaacaggggttcgaatcccctaggggacgccaatgcgcggtatgagtgaaaggcgtaccacttatctgacgagagtcagagaataactaagctaattcaaacgagttatcttacttattatgctctttaacaatctggaacaagctgaaaaattgaaaacaaatcaatatatcaacgaggtatattggtgagtctctcaaaatctcaaactttgaatgtgttttgacatcaaagtgggatgagcgagcaatttacagttcgaggcggacagcgcacagcaagcgcagcatacttaagtatgtgagcattgcgagcactgcccaacgaagaaatgtaatctgcgcagccatcaccacccagatagtctttgaaagagacactttcgggttgtgaggttaagcgaataagcgtacacggtggatgcctaggcaatcagaggcgatgaaggacgtgctaatctgcgaaaagcgtcggtaaggtgatatgaaccgttatacccgacgatatccgaatggggaaacccagtatccaatggatactatcattaactgaatccataggttaatgaggcgaaccgggagaactgaaacatctcagtaccccgaggaaaagaaatcaaccgagattcccctagtagcggcgagcgaacggggagcagcccagagtcttaatcaatagcagtgtcaggagaacggtctggaaagtccggcagtaaagggtgatagccccgtatctgaagatgctgttattgtgaactcgacgagtagggcgggacacgtgttatcctgtctgaatatggggggaccatcctccaaggctaaatactcctgattgaccgatagtgaaccagtaccgtgagggaaaggcgaaaagaaccccggcgaggggagtgaaaaagaacctgaaaccgtgtacgtacaagcagtaggagccccatcactcaagtgcctcgcactgagtgatgcaagaacatcaccgaaaatagcgccgaatttgctaacaaggttggtcgattttttcaagccgtcgcgcagtgtacctagaagtacacgagcaacggaagttaaaaaatcgggcaagattgaacgcaaaggcaagcgggacatttgaggatggggtgactgcgtaccttttgtataatgggtcagcgacttatattctgtagcaaggttaaccgtataggggagccgtagggaaaccgagtcttaactgggcgaatgagttgcagggtatagacccgaaacccggtgatctatccatgggcaggttgaaggttgggtaacactaactggaggaccgaaccgactaatgttgaaaaattagcggatgacttgtggatgggggtgaaaggccaatcaaaccgggagatagctggttctccccgaaagctatttaggtagcgcctcgtgaactcatcttcgggggtagagcactgtttcgactagggggtcatcccgacttaccaactcgatgcaaactgcgaataccgaagaatgttatcacgggagacacacggcgggtgctaacgtccgtcgtgaagagggaaacaacccagaccgccagctaaggtcccaaagtcatggttaagtgggaaacgaagtgggaaggctcagacagccaggatgttggcttagaagcagccatcatttaaagaaagcgtaatagctcactggtcgagtcggcccgcgcggaagatgtaacggggctaaaccatgcaccgaagctgcggcagcgacacaaagtgttgttgggtaggggagcgttctgtaagcctgcgaaggtatactgtgaggtatgctggaggtatcagaagtgcgaatgctgacataagtaacgataatgcgggtgaaaaacccgcacgccggaagaccaagggttcctgtccaacgttaatcggggcagggtgagtcgacccctaaggcgaggctgaaaagcgtagtcgatgggaaacgggttaatattcccgtactggtggtaactgcgatgggggaacggagaaggctaggttgtccgggcgacggtcgtcccggttcaagcaggtaggcagagtgattaggcaaatccggtcacttaatgctgagatgtgatgacgaaccaccaaggtggtgaagcaattgatgccccgcttccaggaaaagcctctaagcttcaggttaccaacaatcgtaccccaaaccgacacaggtggtcaggtagagaatactcaggcgcttgagagaactcgggtgaaggaactaggcaaaatggtgccgtaacttcgggagaaggcacgctggcggtaggtaaagtcccttgcggacggcgctgaagccagtcgaagataccagctggctgcaactgtttattaaaaacacagcactgtgcaaacacgaaagtggacgtatacggtgtgacgcctgcccggtgctggaaggttaattgatggggtcagccgtaaggcgaagctcctgatcgaagccccagtaaacggcggccgtaactataacggtcctaaggtagcgaaattccttgtcgggtaagttccgacctgcacgaatggcgtaatgatggccaggctgtctccacccgagactcagtgaaattgaactcgctgtgaagatgcagtgtacccgcggcaagacggaaagaccccgtgaacctttactatagcttgacactgaacattgagccttgatgtgtaggataggtgggaggctttgaagtgtggacgccagtctgcatggagccaaccttgaaataccaccctttaacgtttgatgttctaacctaggcccataaactgggtcggggaccgtgtctggtgggtagtttgactggggcggtctcctcctaaagagtaacggaggagcacgaaggttggctaagcatggtcggacatcatgcggttagtgcaaaggcataagccagcttgactgcgagagtgacggctcgagcaggtacgaaagtaggtcttagtgatccggtggttctgaatggaagggccatcgctcaacggataaaaggtactccggggataacaggctgataccgcccaagagttcatatcgacggcggtgtttggcacctcgatgtcggctcatcacatcctggggctgaagtaggtcccaagggtatggctgttcgccatttaaagtggtacgcgagctgggtttagaacgtcgtgagacagttcggtccctatctgccgtgggcgttggaagattgagaggggttgctcctagtacgagaggaccggagtgaacgcaccactggtgttcgggttgtcatgccaatggcattgcccggtagctaagtgcggaagagataaccgctgaaagcatctaagcgggaaacttgcctcgagatgagtcttccctgtcactttaagtgacctaaaggaacgtttaagactaagacgttgataggctgggtgtgtaagcgtagcgatacgttgagctaaccagtactaatgaaccgtgaggcttaacctgacaacaccgaaagtgttttgtcagagagacgaaacgatgaagtcagcttgtttaagattgaattactggcgacttaccgaaaggaaagaagcgagtgattaaaaccgaatttgcttggcggccatagcgcggtggtcccacctgatcccatgccgaactcagaagtgaaacgccgtagcgccgatggtagtgtggggtctccccatgtgagagtagggaactgccaagcatcaatatttaggctgtgtcagccggtgacaataagccactagtgctgatatggctcagttggtagagcacacccttggtaagggtgaggtccccagttcgaatctgggtatcagcaccataaaaaattattgataactacataaacagatagttatatacagaatttgcttagcggccatagcgcggtggtcccacctgatcccatgccgaactcagaagtgaaacgccgtagcgccgatggtagtgtggggtctccccatgtgagagtagggaactgctaagcattaaataagacgagaaagccaacccaatgggttggcttttttgcatttgtttttctttattcttaatgatcatcacacctagaatattacaggtatctttttaacttactcttattacctaccaacagctcactcgcgctatcctcacagcaggttgactgctaaactaagctatcagctaaatgaggtcgactttcatgaatgaacctatttcattgcaatcatttaatacatttggtttgaaagccaatgctcgtcatatagaaacggcaaagaatacagatgaactctgtcggtactggcaaaatgctcaagaccaaaaactgcctattcttattttaggcggagggagtaatgttctattcattgaagattttaacggtacggtgattagaaactgtatttctggcattgaaattacagaagatgagcaacaatggcatattcatgttggggcaggtgaaaattggcataaccttataaagagcttaattgaaaagcatatttatgggttagaaaatctcgctttaatccctggtaatgttggatctgctcccatacaaaatattggtgcttatggtaaagaattaaaagacgtttgcgcctatgttgatattgttgagttaagcactggtaaagtcacgcgtttaacaaatgaagagtgccaatttggctatcgcgacagtatttttaaacatcactatcagcaaggttatgcaattattgccgttggcttagtgctgaataaacattgggaacctattttgacctatggtgatttagctaaattatcaccagaaacagtcacaccacagatagtattcgactctgtatgcggtatgaggacaagtaaattaccggatcctgctcttacaggtaatgcgggtagtttttttaaaaatcctattgttgatataaaacttgcacaacgcttaaaaagtaaatatccattttgccctcaatatgtacaacataatggtgtaaaacttgctgcaggctggcttattgatcaatgtggtttgaaaggttatcagagcggtggcgctgctgtgcatacaaaacaggcattggtattaattaataaagaaggcaaggcaagtgggcgcgatattgttaatttagcaagttatattcgccaaaaggtatttgaacgttttggagtgcaattagagccggaagtgcgttttattggacggcatggcgagattaacgcggtggatgctatttcatgaaagagacatcaactcctctattactcatcaatatccttgctgatggtgagctccattcaggagaacaattaggcgaaagtttggggatgacacgggcagggattaataagcatatcaagacattgcgtagctggggtatcgacattcatacagtggcaggtcagggttatcagctagatgcaccgatgaacctgttaaacagtgaacgtgtcaatcgaggcattcaaggtgcaccagctcgtgtgataccggttattgattcaactaaccagtatatgatacagcgtattagtgaattaacctccggtgatgtttgtattgctgaatatcaatctgcagggcgtgggcgtagagggcggcaatggatctctccttttggtcgtaatctatatctcagtatgtattggaaattggatcaaggacctgctgccgcaatcgggctaagtttagttgttggtgtgatccttgctgaagttttacagcaatttggtgcgaatggtgtcaaagttaaatggccaaacgatctttacttaaatgataaaaaattatctgggatcttggttgaattaacgggaaaaacaggtgatgttgcgcatattgttactggcattggtattaatatcgccatgagtaacaatcaaaaagatgcaataaaccaacaatggattaatttagagcaggtagggataaaaatagataggaatcagttggcttgtgaaatcaccaatgcgctaagaaaagcatttgtacaatttgaaaaacaggggttatctgcttttattgaacgttggaaaagtttagataattttattgataggcgtgttaaattaattattggtgacaaagagatctttggtatcgctaaaggtattaatgagcaaggggcgttacttttagaacaaaacaataaaatagtaccctatattggtggtgagatctcgctacgaagtgcaccataattggtttattttgctgcaattttcatattaaaatatgctctctaaaataggtaaagagagcatatttaaatttaatccacctatttatagggtgagaattgataatttatctattctctaaataggtaagatttatttacgtaacctaacacttttaaccgaatggttatcacccttagtcataatcaaactggctctttcacgggttggtaaaatattttgctttaggtttaagccattaatttcttgccaaatggaagacgcgatctcaatagattcttcgcgactcagtttggaataattattgaaataggattcgggatcggtaaatgccccttcacggaattttaaaaatcggctgatataccagtgtttcaataatgcttcatctgcatcaacataaatggaaaagtcgacataatctgatacaaaaacattgtgtggatcatgagggtagtcttgattactctgtaatacattgagtccttcaaggatcaaaatatcgggttgctcaatgacctgttttttgtctggaataatgtcatacactaaatgagaatagacaggtgcagtcacttgctttttgcccgatttaatatcagagacaaaagagacaagactatgcatatcataggattcaggaaacccttttttcttcattattccgcgtttttttaattccgcattaggtaataaaaatccatcagtggtaatcaaatccactttccgatgttcaggccaacgagttagcaaagcttgaagtaaacgggcagtcgtacttttacccaccgctacgctacccgctataccaatgatataaggaattttggcgttatttgtgcctagaaactgttctaagacagcctgacgacgtaaatttgaactgatatagaaatttaacaaccttgataatggaagataaatttcaatgacatcatcaattgagatttcttcattaatgcctttaaggtcggcaatttctgtttctgttaatgttaagggaaccgaattccttaacgtagcccactgctttctatcaaattctaaataaggggttgtaaagcgttctttgttattcataagccaacatctgcctagtattcgcaggttggacaggctgtttaaaacacccgtatccgataaaaaataaacagcatcataacgagtgatgtggcagaggcgtagagattttttactttttttctgctttttttgacgcgaactgaataaatttgtaaaaaaagtacaaaaaatagtcataaaaaataaaaataagcgtagaataaaagcgtaaaaataattcttttaggtgaattttactgtttagtgataaatctaggattgtagagagaatattgcgttggattttctttgatttttttgctgtcattttggtcgtttttttcctaaaaaatcaacaatacatacaaaaatgaacaaaatctaagcaaaagaacaaatatcgcaatttttttgttgcatcatgacgaaagtcctcctagaatgcgcaccacttagccggcatagctcagttggtagagcaactgacttgtaatcagtaggtcccgagttcgactcttggtgccggcaccatttaaaatttagatttggtgggatacccaagcggccaaagggagcagactgtaaatctgccgtcacagacttcgaaggttcgaatccttctcccaccaccattaattccttacttaagtgttttcaaatcgtgaacacttgagtagaatacaaagctgattttaagtcaggtagccgagttctgcgggcatcgtataatggctattacctcagccttccaagctgatgatgcgggttcgattcccgctgcccgctccagatgtgctgatatagctcagttggtagagcgcacccttggtaagggtgaggtcggcagttcgaatctgcctatcagcaccactccccaatgttcttgccttcctgattaaaaatcttaacaagcatagctaatcgctagtttaattactgcttggttgatgtggtgtaaccaccgattccgtgtcttagagggacaatttaaatgtctaaagaaaaatttgaacgttcaaaaccgcacgttaacgttggtactatcggccacgttgaccacggtaaaacaactctgactgctgcaatcactacagttttagctaaaacttacggtggtgctgctcgtgcatttgaccaaatcgataatgcaccagaagaaaaagcgcgtggtatcaccatctctacttcacacgtagaatacgatactccaactcgccactacgcacacgtagactgcccaggccacgccgactatgttaaaaacatgatcactggtgctgcgcaaatggacggagctattctggtagtagcagcaactgatggtccaatgccacaaactcgtgagcacatcctgttaggtcgtcaggttggtgttccttacatcatcgtattcctgaacaaatgtgacatggtagatgatgaagagctgttagaattagttgaaatggaagttcgtgaacttctgtctcaatacgatttcccaggcgatgacactccagtaatccgtggttcagcgctgaaagcactggaaggcgaagcagagtgggaagcaaaaattgttgaattagcagaagcactggatacttatatcccagagccagagcgtgcaattgacaaaccattcctgttaccaatcgaagatgtattctcaatctcaggtcgtggtacagtagttactggtcgtgtagagcgtggtatcatcaaagtaggtgatgaagttgagattgttggtatcaaagaaaccgcaaaaacaacttgtactggcgttgaaatgttccgtaaattacttgacgaaggtcgtgcaggtgagaacgtaggtgttctgctgcgtggtacaaaacgtgaagaaatcgaacgtggacaagtactggcgaaaccaggttcaatcaacccacacaacaaatttgaatcagaagtttatattctgagcaaagatgaaggtggtcgtcacactccattcttcaaaggctaccgtccacagttctacttccgtacaactgacgtaactggtactatcgaattaccagaaggcgtagaaatggtaatgccaggcgacaacgtgaacatgatcgttgaactgatccacccaatcgcaatggacgaaggtttacgcttcgcaatccgtgaaggtggccgtacagtaggtgcgggtgttgttgctaaagtattaggttaattcctagctttattatttttgaaaagggcatctgatgatgcccttttttagtttatgcctctattaacgataactagcttattgccattattcattttttattatcatcagcacacttagatagatctgtacgataaatagaaattgaaataacaatgattatcatttactatcttgataggtagttaatgaggtcgttattatgtatgtctgtctgtgtcatggtgtgagtgataaaaaaattatctctactgttcataaacataaaattcgaacaatcaatcaattgcgtcaaatcctacctgtaggcagttgttgtggtaaatgtatacgtcaagctcgtcaacttatagatgatgaacaacacctcctttatcctcaaatttctgaagttgcataacagtttttaatattcctttctctctactttgtataaaaggtctacactaaaaagactggaagcaaaggagcataaaaatgaaaggtgataaaaaaatgatagcccaccttaataaattattaggtggtgaacttgttgcaattaatcagtatttcttgcatgcccgtatgtttaaaaattggggatttactcgccttaatgcgatggaataccatgagtctattgatgaaatgaagcatgctgataaatatattgagcgtattttatttttagaaggtatccctaacttacaagatttaggaaaactcaatatcggtgaagatgttgaagagatgttgcgttcagatcttgaactcgaattagggggagcaaaagacttacgtgaagctatcgcttatgctgattcaattcatgattatgtgagcagagatctgatgctagaaatcttaacggatgaagaagggcatatcgattggattgaaacccaactagagcttattgaacgtatcggactacaaaactatcttcaagcgcaaatgattgaagagtgatctcatcttttagcaaaaaagaagtattaatctttctttattgctatctatcgaatttataaaagcaaaggtaacgctattgttgcctttgccttttattttttaagttcaatttgctgtgactagataatttttatcgctgtttttttattcttggcttgatttcatctctcaggcaagtataatgcgcaggctcactgatttagtggggctgatttatcagctaatgcagatttttttattgcattaatataatactcccgattggggagttatatgcagaacgattacactctctcatcaatcgaaatgggtacgagtagtaatcatttacgtttataaaaaatagttggagctctggtctcatgcagaaccaaagaatccgtatccgcctgaaagcttttgatcatcgtctgattgatcaatcaactgcggaaatcgtagagactgctaagcgcacaggtgcgcaagttcgtggtccaatcccactgccgactcgcaaagagcgtttcacagtgttgatttctccgcacgttaataaagatgcgcgtgatcagtatgaaattcgcactcacaaacgtctggttgacatcgttgagccaaccgagaaaaccgttgatgctctgatgcgtctggatctggctgccggcgtagacgtgcagatcagcctaggttaatcaggtcatcaagcgattgagaggttgaaacaatgattggtttagtcggtaaaaaagtaggaatgactcgtatcttcactgaagatggcgtttcaatccctgtaaccgttatcgaaattgaaaacaaccgtgttactcaggtcaaagatctagagaaagacggttatcgtgcaattcaggtgactacaggtagcaaaaaagcgaaccgtgtactgaaacctgaagcaggtcattttgctaaagctggcgttgaagctggccgcttactgcgtgaattccgtctgaacgaaggcgaagaatacactgtaggtcaaagcattagtgtagaaattttcgctgacgttaaaaaagtcgacgttactggaacatctaaaggtaaaggttttgctggtactgtaaagcgctggaacttccgtactcaagatgctacccacggtaactccttgtctcaccgcgttccgggttctatcggtcagaaccagactccgggtcgtgtatttaaaggcaagaaaatggcaggtcaactgggtaacgaacaagttaccgttcagagcctggaagtagtacgtgttgacgctgagcgcaacctgctgctggtcaaaggtgctgtcccaggtgcaactggcagtgacctgatcgttaaaccagctgtcaaggcgtaacgtcgaggagataggaatggaattggtaatgaaagacgcgcaaggcgcgctgactgtttccgaaactaccttcgggcgtgactttaacgaagcgcttgtgcatcaagtagtcgttgcatacgctgctggtgctcgtcaaggtactcgtgctcagaaaactcgtgctgaagtttctggttcaggcaaaaagccatggcgccagaaaggtacaggtcgtgcacgttcaggttcaatcaagagcccaatttggcgctctggtggtgttagcttcgcagctaaaccacaggaccacagtcaaaaagtaaacaaaaagatgtaccgcggtgctctgaagagcattctgtcagaactggtacgtcaagatcgtctgatcgtcgtagagaagttctctgttgaagcgcctaaaactaagcttttagcacagaaactgaaagatatggctctggaagatgtactgattgtcacagcagaagttgatgagaatctgtatttagcagcacgtaacttatacaaagtagacgttcgtgatgcagcaacaatcgatccagttagcttaatcgccttcgacaaagtcgtcatgactgctgacgctgtgaagcaagttgaggagatgctggcatgatccgtgaagaacgtctgctgaaagtactgcgcgcgccgcatgtatctgaaaaagcttctatcgcgatggaaaaatcaaacaccatcgttctcaaagttgctaaagacgcgaccaaagcagagattaaagcagctgtacaaaaactgtttgaagtcgaagttgaaagtgttaacactctgctgatgaaaggcaaagtgaaacgtcacggtcagcgtattggtcgtcgtagcgactggaaaaaagcttacgtcaccctgaaggaaggccagaatctggacttcgtcggcggcgctgagtaagtcggaggagtaaagaacaatggcaattgttaaatgtaaacctacgtctccgggccgtcgccacgtagttaaagtggtaaacccagagctgcataaagggaaaccttatgcgccattgctggaaaagaacagcaaatccggtggtcgtaacaacaatggtcgtatcactacccgtcatatcggtggtggtcacaaacaggcttaccgtattgttgactttaaacgcaacaaagatggtatccctgcgacagtagaacgtctggaatatgatccaaaccgttcagctaacatcgctttagtgctgtatgctgatggtgaacgccgctacatcctggctccaaaaggcctgaaagcgggtgataaagttcaatctggcgttgatgctgctatcaaaacgggtaacaccttaccaatgcgtaatatcccggttggttctaccgttcataacgtagaaatgaaaccaggtaaaggtggtcagttagctcgttcagctggtacttacgttcaaatcgttgcgcgtgatggtgcttatgtcactattcgtctgcgttctggtgaaatgcgtaagatcccttctgattgccgtgcaactatcggtgaagtaggtaactctgagcacatgttacgcgttctgggtaaagctggtgcaagtcgctggcgtggtattcgtcctaccgttcgcggtactgcgatgaacccagtagaccacccacacggtggtggtgaaggtcgtaactttggtaaacaccctgtaacaccttggggcgttcaaaccaaaggtaagaagactcgtaaaaacaaacgcactgaacactttatcgttcatcgtcgtactaagaaataattagaggataagccatgccacgttctctcaagaaaggtccatttattgacctgcacttgctgaagaaggtagagaaagcggtggaaagcggtgacaaaaagcctgttaagacttggtcccgtcgttcaacgatctttcctaacatgatcggtttgaccatcgctgtccataatggtcgtcagcatgttccagtttacgtttccgacgaaatggttggtcacaaactgggtgaattcgcgccgacccgtacttatcgcggtcatgcagccgataaaaaggctaagaagaaataaggtaggaggaagagatggaaactatcgctatacatcgccacgctcgttcttctgctcagaaggttcgcctggtggcagacctgattcgcggtaagaaagtgtcgcaagctctggaaactctgacctataccaacaagaaagctgctggtttagtgaagaaagtactcgagtctgctattgctaatgcagaacacaacgatggcgctgacattgatgatctgaaagtagctaagatctttgttgacgaaggtccttctatgaagcgcattatgcctcgtgcaaaaggccgtgcagatcgtattctgaagcgcaccagccacatcactgtggttgtgtccgatcgctgagactctggagactagcaatgggtcaaaaagtacatcctaatggtatccgccttggcattgtcaagccttggaattccacatggtatgcgggtaccaatgaattcgctgacaacctagacagcgattttaaagtgcgccagtacttaactaaagaactggcaaaagcatctgtatctcgtatcgttatcgaacgtcctgcgaaaagcatccgtgtgactattcacactgctcgcccaggtatcgttatcggtaaaaaaggtgaagatgtagaaaaactgcgtaaaaacgtagcggatatcgctggcgttcctgcgcaaattaatatcgccgaagtacgtaaacctgaactggacgcaaaattagttgctgacagcatcacttcacagctggaacgtcgtgttatgttccgtcgtgctatgaagcgtgcggtacagaacgcaatgcgtttaggcgctaaaggtattaaagtggaagtaagtggtcgtttaggcggcgctgaaatcgctcgtactgaatggtatcgtgaaggtcgtgtacctctgcacactctgcgtgcagatatcgactacaatacctcagaagcacatactacttatggtgtgctcggcgttaaggtatggatcttcaaaggtgagatcctgggtggtatggctgcggttgaacaggcggaaaaaccagccgctcaacctaaaaagcagcagcgtaaaggccgcaagtaaggagagtcgctgatgttacaacctaagcgtacaaaattccgtaaagtgcataaaggccgcaaccgtggcttagctataggtacggatgtaagcttcgggacttacggtcttaaagctgtgggccgtggtcgtctgactgcacgtcagatcgaagcggcacgtcgtgcaatgacccgtgcagttaagcgtcagggtaaaatctggatccgtgtgttcccagacaaaccaatcactgaaaagccgctcgaagtccgtatgggtaaaggtaaaggtaacgtagagtattgggttgccttgatccagccaggtaaagtcctatatgaaatggatggtgtgcctgaagaagtggcccgtgaagcatttcagctagcggcagcaaaactgcctatcaaaaccacctttgtaactaagacggtgatgtaatgaaagcaaaagagctgcgcgaaaagagcgttgaagagctgaacactgaattgctgaacttactgcgtgagcagttcaatctgcgtatgcaggcagcaagtggtcagttacaacagtctcatctgttgaaacaagtgcgtcgtaatatcgcacgcgttaagactttactgactgagaaggcgggtgcgtaatgaccgataaaatccgtactctgcaaggtcgtgtggtaagtgacaaaatggaaaaatctgttgttgttgctatcgatcgtatggtgaaacatccattatatggtaaattcatccgtcgtacgactaaactgcatgtacatgacgagaacaacgaatgtggcatgggtgacgtagtagaaattcgtcaaacacgtcctatctctaagactaagtcttgggcgttagttcgcgttgtagaaaaagctgttctgtaataaaatagccttttcgtacgaaataaacggctcaaaactgaacgagccgtttattttttctgtccatatcgagaatgtggtgttataatgccgctccctcgtattatgggatattgaacggcctcttctaatgtggaagtggctcagtagtagttgacatttagcggagcactaaaatgatccaagaacagactatgctgaacgtggccgacaactccggtgcacgtcgcgtaatgtgtatcaaggttctaggtggctcgcaccgtcgctacgcagatgtaggtgacatcatcaaaattaccattaaagaagcaattccacgtggtaaagttaagaaaggtgatgtactgaaagcggtagtggtgcgcaccaagaagggtgttcgtcgccctgacggttctgtcattcgcttcgatagcaacgcttgtgtattgttaaacaacaacagcgagcaagttattggtacgcgtatttttgggccggttactcgtgaacttcgtaacgagaagtttatgaaaataatctctctggcacctgaagtactctaaggagcaggcaatggcagcgaaaatccgtcgtgaagacgaagttatcgtgctaactggtaaagataaaggtaagcgcggtaaagtaaaacaggttctttcttctggtaaagttatcgttgaaggtatcaatctggttaaaaaacatcagaagccagtaccggctctgaaccaaccaggtggcatcgttgaaaaagaagctgcaattcaagtttctaacgttgcaatcttcaatgcggcaaccggcaaggctgaccgtgtaggttttagattcgaagacggcaaaaaagttcgtttcttcaaatctaataaagaaactatcaagtaatttggagtatacgatggcgaaactgcatgattactacaaagacgaggtagtccaaaaactgatgtctcagtttggttaccattctgtcatgcaagtccctcgggtcgagaagatcaccctgaacatgggtgttggtgaagcaattgctgataaaaaactgctggataatgcagcagctgatttagcagcaatctcaggtcaaaaacctctgatcaccaaagcacgcaaatctgttgcaggcttcaaaatccgccagggctatccgatcggctgtaaagtgaccctgcgtggcgaacgcatgtgggagttctttgaacgtctgatctctattgctgtaccacgtatccgtgacttccgtggtttgtccgctaaatcattcgatggacgtggtaactacagcatgggcgtgcgtgaacaaatcatcttccctgaaatcgattacgataaagtggatcgtgttcgtggtttggatattaccattactacgactgcgaaatctgatgatgaaggtcgcgcattgttagcagcgtttaacttcccgttccgcaagtaaggcagggcattcatggctaagaaatctatgaaagcacgtgatgtaaaacgtgcgaatttagctgagaaattcttcgcaaaacgcgcagaactgaaagctatcgtttcagatgtaaacgtatctgatgaagatcgttggaatgctgttctgaaactgcaaacactgccacgtgattcaagtccttcacgtcagcgtaaccgctgccgtcaaactggacgtccgcacggtttcctgcggaaatttggcctaagccgtattaaagtccgtgaagccgctatgcgcggtgaaatcccgggccttagaaaggctagctggtaatcaccctaattgaatcacgggagtaaagacagatgagcatgcaagatcccatcgcggatatgctgacccgtatccgtaacggtcaggccgcgaataaagttgcggtcacaatgccttcctccaagctgaaagtggcgattgccaacgtgcttaaggaagaaggttatatcgaagattttaaaattgaaggcgacactaagccagaactggaaatcactttaaaatatttccaaggtaaggctgtagtagaaagcattcagcgcgtaagccgtccaagtctgcgcatctataaaagaaaagatgagctgccacaagttatggcaggactgggcatcgctgttgtttctacctcaaaaggtgttatgactgatcgtgcagctcgccaagcaggtcttggtggcgagattatctgctacgtagcttaattcgggaggaaagaatgtctcgtgtggcaaaagcacccgtcgtcattcctgccggcgtagaggttaaactcaacggtcaggtaattacgattaagggtaaaaacggcgagcttactcgtactatccataatgcagttgaaattcaacatgctgacaaccaactaactttcgcaccacgcgatggttatgctgatgcatgggcacaagcgggtactactcgttcactgctaaatgcaatggttgtaggtgttaccgaaggcttcactaagaaactgcaactggtaggtgtaggttatcgtgcgtctgttaagggcaacacagttaacttatcagtaggttattcacatccagtggaacaccaactgccagcaggcatcactgctgaatgtccaacacaaactgaaatcctactgaaaggtgcggataagcaagtgattggtcaagtagcagctgaactgcgtgcttaccgtcgccctgaaccttataaaggtaaaggtattcgttacgccgacgaagttgtgcgtatcaaagaggctaagaagaagtaaggtaacactatggataagaaagcagctcgtatccgtcgtgcgacccgcgcacgccgtaagctccaggaactgggtgcgactcgcctggtggtacatcgtacccctcgccatatttatgcgcaggttattgcaccaaacggttctgaaactttggtggccgcttctactacagaaaaagctatcattgagcaactgaaaaacactggaaacaaagaagcagcagcagtagttggtaaaattgttgctgaacgcgctctggaaaaaggtatcaaatcagtatcatttgaccgttccggtttccaatatcatggtcgagtccaggcactggcagatgctgcccgtgaagctggccttcagttctaaggtaggagtgtaagatggctcacatcgagaaacaagctggcgaactgcaggaaaagctgatcgcggtaaaccgcgtatcgaaaaccgttaaaggtggtcgtatctttagcttcaccgctcttacagtagttggtgatggtaatggccgcgttggttttggatatggcaaagctcgcgaagttccggcagcaatccagaaagcgatggaaaaagcccgtcgcaatatgaaaaccgtcgctttaaacaacggtactctgttccaccctattaaaggtactcatacaggttctcgcgtatttatgcagcctgctcatgaaggtactggtatcatcgcaggtggtgcaatgcgtgcagttctagaagtggctggcgttcgtaacgtactggctaaaacctatggttccacgaatccgattaacgtcgttcgtgcaacactggacgctttagatagcatgaagtctccagaaatggtcgcagctaagcgtggtaaatccgttgaagaaattctggggtaatgaccatggctaagactattaaaattactcaaacacgcagtttaatcggccgtctgcctaaacataaggcaactatggctggtttaggtctgcgtcgcatcggtcacactgtagaacgcgaagatacaccagcagttcgcggtatgatcaacttggtttcctatatggttaaagttgaggagtaagagatgcgtttaaatactctgtctccggctgaaggtgccaagcatgcgcctaaacgtgtaggtcgtggtatcggttctggcctaggtaaaactggcggccgtggtcacaaaggtcagaaatctcgttctggcggtggcgtacgtcgtggttttgaaggtggtcagatgcctttataccgtcgtttaccaaaatttggttttacttcacgtaaatcattcgtgactgcggaaatccgtctgtctgatttggcttatgttgaaggcgatgtaatcgatctgaatgcactgaaagccgcaaacgttgttggcccacagattgaatttgcaaaattaattctgtctggcgaggttaaccgtgcagtgactattcgtggtctgcgtgttaccaaaggtgcccgtgcagcaatcgaatcagctggcggtaaaattgaggaataagtgacagatggctaaacaaccagggttagattttcagagtgctaaaggtggtataggtgaactaaaacgcagattactgtttgttcttggtgcactaattgtctttaggattggctcttttattcctatccctggtattgatgccactgtgcttgccaaattgctcgatcagcaaaaaggcaccatcattgaaatgtttaacatgttctctggtggtgctcttagccgtgcttctatctttgcgctgggtatcatgccttatatttcggcatcgattattatccaactattatcagtggttaaccctcggttagcggagattaagaaggaaggggaggccggtcgtcgtaagatcagccaatatacccgttatggtactttggtgctggcgatattccaatctattggtatcgcaacaggcttaccgaatatgccaggaatgcaaggtctggttattaatccaggcttaccattctatattacggctgttgtgagcttagtcacagggacaatgttcctgatgtggttaggtgagcaaatcactgaacgtggtattggtaacggtatctcaatcattatctttgcaggtatcgttgcaggtcttccacctgccattggtcaaaccatcgagcaggcgcggcaaggcgaactgcacttcctcctgttattgttggttgcagtattggtgttcgcggtaactttctttgttgtttttgtagaaagaggacaacgtcgtatcgttgttaactatgcaaaacgtcaacaagggcgtagaatatacgcggcacaaagtacacatctaccacttaaggtaaatatggcgggtgtaataccggcaatttttgcttcaagtattattctgtttcctggtacaataacctcttggtttggcgatggtacaggatggggttggctgacgacaatttctttaaatttacagcctggtcaacctatttatgtgttactatacgctgctgcaatcatcttcttctgtttcttctatacggcgttggttttcaacccaagagaaacggcagataacctgaagaagtccggtgcatttgtaccaggaattcgcccgggagagcagacggctaaatatatagataaagtgatgacacgtttaaccttaatcggtgctctgtacattacctttatctgtctcatcccggagttcatgcgtgacgcaatgaaagtacctttctattttggtggtacttccctcttaatcgtggttgtggtcatcatggattttatggctcaagtgcaaactctcctgatgtcaagtcagtatgagtctgcattgaaaaaagcaaaccttaaaggctaattaccgataagatgggtttgttttagaagttacggagagtaaaaatgaaagttcgtgcttccgtcaagaaaatgtgccgtaactgcaaaatcgttagacgtcacggccacgtgcgtgtaatttgcagtgttgaccctaagcataaacagcgtcaaggctaaattattgcatttttttcttgcaaagttcggttgagctggctaaattagccagcccaatcatttataatcatacagtattgtttgagtatcctgaaaacgggcttttcagaatagtactgtataaagttaatttaggagtgcatagtggcccgtatagcaggcattaacattcctgatcataaacataccgtaatcgctttaacatcgatttacggcattggtaaaactcgttcacaggctatctgtgaagcaacgggtattgctgaaaatgttaagatcagtgagctgtctgaagagcaaatcgacaagctgcgtgacgaagttgccaaatacgttgtagaaggtgatctacgtcgtgaagttaccctgagcatcaaacgtctgatggatcttggtacttaccgtggtttacgtcatcgtcgtggtctaccagttcgcggtcagcgtactaagactaacgcacgtacccgtaagggtccgcgtaagccgatcaagaaataatcggggtatttgaacaatggcaaaagcacctattcgtgcacgtaagcgtgtaagaaaacaagtctctgacggtgtggctcatatccatgcttctttcaacaacacaatcgttactattacagaccgtcaaggtaacgcgttgggttgggctactgccggtggttccggtttccgtggttctcgtaaatctactccgtttgcggctcaggttgcagcagaacgttgcgctgaagctgttaaagagtacggaattaagaacttggaagttatggtaaaaggacctggtcctggtcgtgagtcaactatccgtgcattaaacgcggctggtttccgcatcactaatattactgatgtgactccgattcctcataacggttgtcgtccaccgaaaaaacgtcgcgtttaataacggtttcgtttttaggatagttggagaaagaaaatggcaagatatttgggtcctaagctcaagctgagccgtcgcgaaggtacagatttatttctgaaatctggcgttcgggcgattgacaccaagtgtaaactggaacaagcaccaggtcagcacggcgcacgtaaaccgcgtctgtctgattacggtgttcagttacgtgaaaaacaaaaagtacgtcgtatttacggtgttctagagcgtcaattccgtaactactacaaagaagcaacacgtctgaaaggcaacacaggtgagaacttacttactctgttagaaggtcgtctggataacgttgtttatcgtatgggctttggcgcaactcgcgcagaagcacgtcagatggttagccacaaagcaatcatggtaaatggtcgcgtggttaatattgcttcttatcaggtttccccgaatgacgtagtcagcgttcgtgaaaaatcgaaaaaacagtctcgtattaaggctgctttagagctggctgaacagcgtgaaaagccaacatggctggaagttgatgctgctaagatggaaggtgtgttcaaacgtattcctgaacgtactgacttgtctgcggacattaacgagcacctgatcgtcgagctttactccaagtaaggcttagcaccaaagagaggacacaatgcagggttctgtgacagagtttctaaaaccgcgcctggttgatatcgagcaagtgagttcgacgcacgccaaggtgacccttgagccattagagcgaggcttcggccacactctaggtaacgcactgcgccgtattctgctttcgtctatgccgggttgtgcggtaacagaggttgagattgatggtgtactgcatgagtacagcaccaaagaaggtgttcaggaagatatcctagaaatactgctcaaccttaaggggttggcggtaaaagttcatggtaaagatgaagtaattcttactttgagcaaatctggcattggccctgttattgcagccgatatcatccatgacggtgatgtcgaaatcgtcaagccgcagcacgttatctgccaccttacagacgaaaacgcatctattaatatgcgtatcaaagttcagcgtggtcgtggttatgtgccggcttctgcccgaattcattcggaagaagatgagcgccctatcggtcgtttactagtagatgcgtgttatagcccagttgagcgaatcgcttatactgtggaagcagcgcgtgttgaacaacgtaccgacttggataagctggtaatcgagatggagactaacggtactatcgatccagaagaatcgattcgccgtgcagcgactatcctggctgaacagcttgaagcttttgttgacttacgtgatgttcgtcagcctgaagttaaagaagagaagccagagttcgatccgatcctgctgcgcccagttgacgatcttgaattgactgtccgctctgctaactgtctgaaggcagaagcaatccactacatcggtgatctggtacagcgtactgaagttgaattacttaagacgcctaaccttggtaagaaatctcttactgagattaaagacgtactggcgtcgcgtggtttatctctgggcatgcgccttgagaattggccacctgcaagtatcgctgatgaataagatcacaggttaaggttttactgagaaggataaggtcatgcgccatcgtaagagtggtcgtcaattgaaccgcaacagcagccatcgtcaggctatgtttcgcaacatggcaggttctttagttcgtcatgaaatcatcaagacaactttgcctaaagcgaaagaactgcgtcgcgtcgttgagccgctgattactcttgccaagaccgacagcgtagctaatcgtcgtctggcattcgcccgtactcgtgacaacgaagtcgtggcaaaactgtttacagtattaggtccgcgttttgcgagccgtgcaggtggttacactcgtattctgaagtgtggcttccgtgcaggtgacaatgctccaatggcttacattgagcttgttgaccgtgctgattctgaaacagaagcagctgctgaataataaaattattattcagcgaagcgaataaaaagaccggattttttaatccggtttttttattgctatagattagcaataaatttaaatttattggtccctccctttaatgactcgctacttctttatttatgtgggtgctatatatttacttctgaatatgctgctattgtgcgaaagtaagtattgagtatcgcactatatttcaattctatttttttggttatttgttatgcttacttatcattagtttgaggagtgatcaatgtatcgcatcggccaaattgcaaaattagcgaatgttacaacagatactatccgtttttatgaaaaacaaggattgatggaacatgatagacggacagaaggtggctatcgtctgtatacagaacaagatttgcaaagattacgctttattcgttatgccaaagagttaggctttactctggatgctattactgagttactttcaattagagtcgatcctgcgcatcatacttgtgtagaatcaaaacatattgttgatgctaggctagcagaagttgaggctcgtctaaaagaaatggaaaagatgcgtgattctttaaaaatgttaagcaatgcttgctgtggaaccgctcatgaaagtacatattgttcaattctagaaatacttgaatctggagcgacaaagcaataatatctgcactgaagattgttgttctatgctttatgttctttaataatttaagaggtttttatgtctagcaaatatcagcaccaaaaaggtgtgatcaaagataatgcgttagctgcacttgttcatgatcctttatttagacaacgggtagaaaaaaataagaaaggcaaaggcagctatatgagaaaggcaaaacataataagaaaggtaactgggaggccagtgataacaaatattttcaattgttatcactggccttttagtttttatttttgctgattttttaatagatcacggatttctgttaataaagtttcttctgctgaaggtgcaggtggtgctttaggttgttcttcttcttgtctgcgcatcttattaattaatttaatcgcacagaaaatagcaaacgcgacaatggcaaaatcaaaaacagtttgtataaaggcaccatagtttaagataacggcaggtatatccccatgagcttctcttagtactaaactaaattgtttaaaatcgatccctccaatgagtaagcctaatggaggcataatcacatcagctactaaggatgaaacaatttttccgaatgctgcaccaatgatgacaccgactgccatgtcaacaacattgcctttcattgcaaattcacgaaactctttgaaaaaagccataaccaccccttattagtatggatctagatataaaaatatgtgtttagataataataatagatcagtatcagtaacaatcactactattcttatttctacactagagttataagaaaaatggactaggttggaacagtttttctacttcaggaacatattttttatctgtaataaacatgatcacatggtcaccttgttctattgagtgacttgcattggcaataatgacatcttcattgcggacaatggcgccgataattgtgcctggcggaagtttgatatcttgaatacgtctaccgacaacttttgaggtattttcatcaccatgtgcaatggcttcaatagcttcagcaacaccgcgacgtaatgaggagacactgacaatatctgctttgcgaacatgacctaatagtgctgaaatagtggcttgttgcggagagatggcaatatcaatgactccaccttggactaaatcaacataagcactgcgttgaataagtaccatggctttttttgctcccatacgttttgcgagcattgcggacatgatatttgcttcatcatcattagtgagtgcaataaagacatcgatttgctcaatatgctcttcagcgagtagctcttgatcagatgcatcaccataaaacacgatagtatcatggaggagctctgctaactcggtagcacgttgttgattatgctcaatcagcttaacgctataatctttttctaatcttgccgctaatcctgctccaacgtttccgccaccaacaatcataatgcgtttataaggtttttctaatcgttgtagctcactcattactgcgcgaatatgttgtgatgccactacgaaaaagacctcatcacccgcttcaataatggtcgatccttgagggcgaataggtctatcttggcgaaagatagccgcaacacgagtatcaatatgtggcatatgatcacgtagagtggatagtgcattacccacaagtgatccaccatagtaggcttttactgccacgatactgacttgaccttcagcaaagtttactacctgtagggcaccggggtattgaattagtttatagatataatctataacgaggtgttccggggagatgaggtaatcaataggaattgcttctggtaaaaaaagtttatctgcttcacgaacaaattcagaggctcggatacgagcaactttattgggagtattaaataaagtataagcgacttggcatgctatcatatttgtttcgtcagaatttgtgacggcaactagcatatccgcatcttcagcccccgcttctcttaagactctcggatgagatccatgaccatttacaactcttaaatcaaatttatcttgaagttgacgtaaacgggtagcatcagtatcgacaacagtaatatcgttattctcaccgacaagattttcagcgagagtgccacccacttgacctgcgcctaagataataattttcatcgtcagttctcagaatattcgattaacaaatacaagatcaatgtctgttcacatcgatcttgtgttggaatagtagcttcttttagatctgatatcatcttttatcagaagatcattttttgttgatcagcgcataaaagaagccatcaccgctatattgctccggtaagcattgatgctgatagtcacattgagcatcttgcattgacgataagaaggctgcaatttgttggctattttcttccggtaaaatagaacaagtagcataaactaatgtgccgcctgattttaggtatggccatatagcatgtaatatttctttttgaatttgcgctaactgagctatgtcttcattacgacgtagccatttgatatctggatggcgacgtataacgccagttgctgagcaaggagcatcaagtaagatcctgtcaaattgcatatttgcacaccattgctctggataacgtccatcaccacttttgactgtggcatgtagttttaagcggtttagattttctttaactctggctaaacgttgctcatcgatatcaatggcgagaacatgcgctttaggggctatttctaagatatgggttgtttttcccccaggggctgcacataaatcaagaatttgttcgttattttgtggcgctaataattctgcacaacgctgagcgctgcggtcttgaacagtgacccagccctcattaaaccctggtaacaggtgaacattacaaggtgtttctaaacgaatagcattgggatggtggtcatcggagaacgcgctgatcccttctttttcaagcagcgctaagtactgttcacgtgaatgatgtatttgatttacccgtaaccacattggtggcttttggttatttccttcaataatactttcccatagctcagggtaggcgttttttattcgtgtgagtaaccaagaagggtgcaaatagcggctatcattattttggaaacgttccattaatacatcttgttgacgctgaaattggcgtaatacaccgttaattaacccttttaattgtggttttttcagtgcgatcgcaccattaacagtttcagcgagtgctgcatgggcaggaactcgagtataaaggagctgatataaaccgaccataatgaggtaatgtaaaattcgttgtttacctttcagtggtttatccattagttgttggatgatccattctagctggggtaaggtacgtaaggtaccaaagcagagctcttgcaagagcgctttgtctttatctgaaatgtttttttgtaattcagggatcaccgaacttaatgataagccttgatctaaaacttgagctattgcctttgctgcaatactgcgtaagttgtatgacgttttcatagtgaattagcgtttatatattggccgccagagaagaataatattggcgtgaaaaaaggaccccctgaaatattgttatttcaaggggtagtatcattattgaatgattttcccaggggtaaaccaatctcgtttggaatttaggaaatcggctgatgccataggttttttacctgatggttgaagcttggtgatatttaaaatgccttcacctgttacaatataaatgcctgttttatctgctttcaataatgtacctggtatttgattggtattatccgacgcgataacttgcgcttcccatactttcaccggctgatcatcgagcataaaaaagctcataggccatggattaaacgctctaatacaacgttctatctgttgtgcagataacgaccaattaatttttgcttcttcctttgatagcttttctgcgtaattcgctaggctatcatcttgtttttccgcttttaactcaccgctaatgataagatctaatgtattaattagtgctttaggccccagctctgctaatttagcataaagagaagcactcgtgtcttgatgagtaattgggcatgatgctttataaagcatatcgccagtatctaaaccaacatccatttgcataatggtgacgccagtttctgtatcgcccgcccataaggcacgttggataggtgcagcacctcgccatttaggtagaagagagccatggacgtttaagcaacctaaacgaggaatatcaagtactgctttgggtaaaatcataccataagcaacaacaatcataacgtcaggttgtagtgctttgatccactcatgattctcttctggttttaacgatgtcggttgataaacaggaatgttattagttaatgccagttctttcactggattaatagtcagtttcttacctcttcctgcgggtttatctggtggcgttaataccccaacaatatgatgttgagttgataacagagcagctaaatgtcgggctgcaaagtcgggtgttcccgcaaagataatacgtaatgaatcagacacgtttttttcctgttacaagtaaatctctattgtcccgcttttgctcttctcttatcgagcttttcaactttctggcggatacgttggcgttttaatggagataaataatccacaaataatttgccaactaaatgatccatctcatgttgaatacaaatagcgagtaagtcatcagcttctaattcaaaaggttgtccgttgtaatcaagcgctcttacttttacgcgctctgcacgaggcacaaatgcgcgttgttcaggtattgataaacaaccttcctctattccggtatcaccttcctgatcaagaagttctggattaatgagtaccagtttttgatctcgtgtttcagagatatcaatgacgatgatgcgctggtggatatccacctgtgtcgcagctaaaccgataccttcttccaaatacattgtttcaaacatatcatcgacaattttttgaatttcggcatcaactttttcgactggctttgcaatggtgcgaaggcgctcgtctggataatgtaatacgtgtaatactgccataatttatttggactgtttctaaaatgtgaatgagaattaacgtctattctagacatttattgtctggattgacagtatttgctgagtttagcactcaccttgtatgttaaaaaataacactaggataatgcatggatgccagagaaatatggataagacttaatgttgtttcaagattgccagtaaataaagcgattaaggtggtggaatacttacaatcattgacgcaactaaatcgtaaagtgttactagaatgtggcctatcagaacaacaaagtcaccaatttatgaggcttcaggcaaattgtgtcaaaagtacattaaagtggctagataaaaatgaatcatcactcttaacaatttctgattcagattatcctttgctattaaaacaaatatcttctccacctcttttgctttttgttgcaggtaataaagagcatttaaaaagcacacaaattgcattaattggtagtagagatgctacacagtatggaactaagtgggcgacttattttgcacaacagctcgtgaaaaataaattcacaattacaagcgggttggcgcaagggattgatggtgttggacatcgtagtgctttaaaacatcatggcgtcactattgctgtattagggagtggtttagaacaaatttacccatcatttcatcgtcgactagcagagcaaatcaaagagtcgggtgttcttgtttcagagcatctcccgatggcacctcctttagctcgtcatttcccgcaaaggaatagaattattagtggattgagttcagctctcttaattgtagaagctggcataaaaagtggatctttaatcactgccaattatgctctacaacaaggcaaagaattgtttgtgttacccggattactcggtgattcacactttgaaggaaatcatcagttgctaaaacagggggcgaatttagcctcttcgccagatgatattatggaatatttaaatagctctttgcagtggttaatctttaatcataatgatgatttacaggacgagcatatcgcagaggttggctcagctaccaacaataaaaaagagtccagcaatatgccattagaaattgaaaaacttacacccactcaacagcaatcaataaatttgatattgcctttgttaggttttgataaagctatcccgattgatattattgcgaataagagcggtttatccacatcagatttagctcctcttttattagagcttgagcttatcgaaaaagtcgctattgtggcgggtggctatattcgattggaataagtgttatgaggtaagacaatggcaaaaataatgccgtttacgtatccatctgagcaagaaaaatgtcctgaatgtggcagtgatttaattataagaaatggtggtcatggcccttttctaggatgttctgcttatcctaattgccattatattaaggcgttgaaatctcaaggcgatggacaggttattaaagtattagaaggacagccttgccaatgttgtggcgcagatttagttttacgacaaggtaagtttggcatgtttataggctgtagcaattatcctgcttgtgagcatatagaacaaattgataaacctgatgagactgtgattcattgtcctcagtgcgagaagggcaaattattacagcgtaagtctcggtttggtaaaatattttatgcttgtaaccaatatcctgaatgtcaatttgtactaaataataaaccgattaatggtgagtgcgaatattgtcattatccattattgatggaaaagaggtcttctcaaggagtaagattagtgtgcgccagcaaattgtgtggcaagcaacaaacaaaaagagaagaacatgaataacgaagtatcacctgtaaataatacaattatagaagcactgcaaaataatcaagttattgcctatccaacagaagctgtgtttggtgtcggttgtgatcctgatagtgaaagcgcggtaatggcattacttgagttaaaacagagagccattgagaaagggcttattttaattgctgataactatgaacaattaaaaccttatattgatgataacgcattgactcaagaacagcgggagcggatgtttgcctcttggccaggcccaatcacttgggttattccagctaagtcaacaacgccaaaatggctaacagggcggttttcttccttagctgtaagggttacggatcaccctattgtgaaagcattatgtgtggcttatggcaaaccattagtatcaaccagcgcaaatttaagcggacttcctccatgccgtagtgttgaagaagtacaagagcagtttcgtaatcgaattgctattgtaaatggcgaggttggtggcagaaaaaatccttctgaaattagagatgcactcacaggtgagctatatcgacaaggataatgatgctatggaaaaatatgtagtgatgggcaatcccattgaacatagtcaatctccttttattcatcagcttttttcgaaacagtcagggattgattatgaatatgggcgtttactggttccattaggcgaatttgataaagtagcaacgcaatttttttctcaaggtggacgtggagctaatgttaccgttccttttaaggaagatgcttttcgctttgtggataaattaacacaaagagcacaagcctgtggtgctgttaatactattttaaaattagatgacggcacgttattaggtgataatactgatggtcagggcttaattcttgatttagctaggttggattttattatccccggaaaaatattatcggttcttgttattggggctggtggtgctacacgagggatattattaccattattaaattataattgtgatattactttgactaatcgcactgttgaaaaagcacaacaattagcacaagaatttagccaatttggtacaattagagctagtgctccacaaaatgttacagataaacattatgatctaattattaacgcctcttcatctagtatgacggacgatattccacctatacctgatagtgcttatggttttaaaactgcttgttatgatttgtattataaggcaggtatgacttcttttttataccatgcattaaaaaatggtagtacacgcttatctgatggcctaggtatgctggtagggcaagccgcttatgccgttgagttatggtatgagcgagtacctgatattaatccaacaataaatattttaagagaaaatttgaataaatgaatcaatccattcaatttcctgatcgtgagcagtggcttgaagatcaaaatagcgttcttttccctatcatggtcaatggaatgttatttgattgccaaatcaccgaacaagagctaaaggcacgctttggtgataatagtaatggtctttgtttgtttaaacagcatcgatgggaaattgaagaagaatttgaagagttggctaagctgtatgaagtgtcaactcttcatccattttactgtttatcaatggcggaatgagccgttgataaatagtcgttcttccactttacgtaattattagcagagtagataaagtgttgtatttctgcgggcgtgagtgggcggatcttttttactgggctacctaaataaagaaaaccactttctagtcgtttacctggtggtactaggcttcctgcgccgatcaagacattatcttcaataattgcaccatcaagtaaaattgatcccatgccgactaatactcggtttccgattgtacacccatgtaacattgctttgtgtccaacagtcacatcatcaccgatgatgagaggaaaaccattaggggtattttctgatgcatgtgtaacatgtagcactgagccatcttgaatattagtccttgctcctacactgacatagttaacatcaccgcggatcacaaccattggccaaatgctgacatcttcactaaggcgtacatcaccaataacggtggctgtcacgtcaatataaacatctttagcaatggaaggtgataagtgtaagtaacttctaatagtggaatggctcatgattgacctcatacgaatattgtggcggtactttgctgtaattgtaatatagaaaagcatagcagtgagcaggtatatctgacgagagaataatccagagtattatttttaactgaaataaatagcgatgataataaaagtaagtggatcgatgatgatcgatagaagataacgaatagacaaaacggttattgctagtataatttttgtgctactagcggggttttagtgtcaaaaatagacgtgtagcttaaaaatagagcgaacagaaaaaaaattgaaataaatacttgcgctaatctgagaagcccctataatgcgcacccactgaccgacgatgagctgacaacagcaacgacggaaagggaagagaaaagaaaaaagtttgaaaaaactcttgactcttcagaggaatagcgtaatatacgcctcctcgcaacaacgcagaagaccggaaacggcagcgatagttgcactgctctttaacaaattatcagacaatctgtgtgggcactcgcagagacgatatcttctaaaaaattagatatatcaagtcttgaagagtgactaacaagttaattcatataatgaataagctaagttttcgatttctttgagcatcaaacacttttaattgaagagtttgatcatggctcagattgaacgctggcggcaggcctaacacatgcaagtcgagcggtaacaggagaaagcttgctttcttgctgacgagcggcggacgggtgagtaatgtatggggatctgcccgatagagggggataactactggaaacggtggctaataccgcataatgtctacggaccaaagcaggggctcttcggaccttgcactatcggatgaacccatatgggattagctagtaggtggggtaaaggctcacctaggcgacgatctctagctggtctgagaggatgatcagccacactgggactgagacacggcccagactcctacgggaggcagcagtggggaatattgcacaatgggcgcaagcctgatgcagccatgccgcgtgtatgaagaaggccttagggttgtaaagtactttcagcggggaggaaggtgataaggttaatacccttatcaattgacgttacccgcagaagaagcaccggctaactccgtgccagcagccgcggtaatacggagggtgcaagcgttaatcggaattactgggcgtaaagcgcacgcaggcggtcaattaagtcagatgtgaaagccccgagcttaacttgggaattgcatctgaaactggttggctagagtcttgtagaggggggtagaattccatgtgtagcggtgaaatgcgtagagatgtggaggaataccggtggcgaaggcggccccctggacaaagactgacgctcaggtgcgaaagcgtggggagcaaacaggattagataccctggtagtccacgctgtaaacgatgtcgatttagaggttgtggtcttgaaccgtggcttctggagctaacgcgttaaatcgaccgcctggggagtacggccgcaaggttaaaactcaaatgaattgacgggggcccgcacaagcggtggagcatgtggtttaattcgatgcaacgcgaagaaccttacctactcttgacatccagcgaatcctttagagatagaggagtgccttctggaacgctgagacaggtgctgcatggctgtcgtcagctcgtgttgtgaaatgttgggttaagtcccgcaacgagcgcaacccttatcctttgttgccagcacgtaatggtgggaactcaaaggagactgccggtgataaaccggaggaaggtggggatgacgtcaagtcatcatggcccttacgagtagggctacacacgtgctacaatggcagatacaaagagaagcgacctcgcgagagcaagcggaactcataaagtctgtcgtagtccggattggagtctgcaactcgactccatgaagtcggaatcgctagtaatcgtagatcagaatgctacggtgaatacgttcccgggccttgtacacaccgcccgtcacaccatgggagtgggttgcaaaagaagtaggtagcttaaccttcgggagggcgcttaccactttgtgattcatgactggggtgaagtcgtaacaaggtaaccgtaggggaacctgcggttggatcacctccttacctaagagatacgtgttatgtgcagtgctcacacagattgtctgatgaagaacgagcagagataccggtataggcttgtagctcaggtggttagagcgcacccctgataagggtgaggtcggtggttcaagtccactcaggcctaccacttttcctttatgctgtgttgtgaagcaactcgtttacattaagtaaacttcgttactccacgccttgcctaaagaaaaagcttcttattataagaagaaaaaggagtggttatacgggtattgaaacattatggggctatagctcagctgggagagcgcctgccttgcacgcaggaggtcagcggttcgatcccgcttagctccaccataatctcttgaatataaaacaatgattcagagtatattaggaatagtatactgcgaattattatgctctttaacaatctggaacaagctgaaaaattgaaaacaaatcaatatatcaccgaggtatattgatgagtctctcaaaatctcaaactttgaatgtgttttgacatcaaagtgggatgagcgagcaatttacagttcgaggcggacagcgcacagcaagcgcagcatacttaagtatgtgagcattgcgagcactgcccaacgaagaaatgtaatctgcgcagccatcaccacccagatagtctttgaaagagacactttcgggttgtgaggttaagcgaataagcgtacacggtggatgcctaggcaatcagaggcgatgaaggacgtgctaatctgcgaaaagcgtcggtaaggtgatatgaaccgttatacccgacgatatccgaatggggaaacccagtatccaatggatactatcattaactgaatccataggttaatgaggcgaaccgggagaactgaaacatctcagtaccccgaggaaaagaaatcaaccgagattcccctagtagcggcgagcgaacggggagcagcccagagtcttaatcaatagcagtgtcaggagaacggtctggaaagtccggcagtaaagggtgatagccccgtatctgaagatgctgttattgtgaactcgacgagtagggcgggacacgtgttatcctgtctgaatatggggggaccatcctccaaggctaaatactcctgattgaccgatagtgaaccagtaccgtgagggaaaggcgaaaagaaccccggcgaggggagtgaaaaagaacctgaaaccgtgtacgtacaagcagtaggagcctctttatggggtgactgcgtaccttttgtataatgggtcagcgacttatattctgtagcaaggttaaccgcataggggagccgtagggaaaccgagtcttaactgggcgaatgagttgcagggtatagacccgaaacccggtgatctatccatgggcaggttgaaggttgggtaacactaactggaggaccgaaccgactaatgttgaaaaattagcggatgacttgtggatgggggtgaaaggccaatcaaaccgggagatagctggttctccccgaaagctatttaggtagcgcctcgtgaactcatcttcgggggtagagcactgtttcgactagggggtcatcccgacttaccaactcgatgcaaactgcgaataccgaagaatgttatcacgggagacacacggcgggtgctaacgtccgtcgtgaagagggaaacaacccagaccgccagctaaggtcccaaagtcatggttaagtgggaaacgaagtgggaaggctcagacagccaggatgttggcttagaagcagccatcatttaaagaaagcgtaatagctcactggtcgagtcggcccgcgcggaagatgtaacggggctaaaccatgcaccgaagctgcggcagcgacacaaagtgttgttgggtaggggagcgttctgtaagcctgcgaaggtgtactgtgaggtatgctggaggtatcagaagtgcgaatgctgacataagtaacgataatgcgggtgaaaaacccgcacgccggaagaccaagggttcctgtccaacgttaatcggggcagggtgagtcgacccctaaggcgaggctgaaaagcgtagtcgatgggaaacgggttaatattcccgtactggtggtaactgcgatgggggaacggagaaggctaggttgtccgggcgacggtcgtcccggttcaagcaggtaggcagagtgattaggcaaatccggtcacttaatgctgagatgtgatgacgaaccaccaaggtggtgaagcaattgatgccccgcttccaggaaaagcctctaagcttcaggttaccaacaatcgtaccccaaaccgacacaggtggtcaggtagagaatactcaggcgcttgagagaactcgggtgaaggaactaggcaaaatggtgccgtaacttcgggagaaggcacgctggcggtaggtaaagtccctcgcggacagagctgaagccagtcgaagataccagctggctgcaactgtttattaaaaacacagcactgtgcaaacacgaaagtggacgtatacggtgtgacgcctgcccggtgctggaaggttaattgatggggttagcgcaagcgaagctcctgatcgaagccccagtaaacggcggccgtaactataacggtcctaaggtagcgaaattccttgtcgggtaagttccgacctgcacgaatggcgtaatgatggccaggctgtctccacccgagactcagtgaaattgaactcgctgtgaagatgcagtgtacccgcggcaagacggaaagaccccgtgaacctttactatagcttgacactgaacattgagccttgatgtgtaggataggtgggaggctttgaagtgtggacgccagtctgcatggagccaaccttgaaataccaccctttaacgtttgatgttctaacctaggcccataaactgggtcggggaccgtgtctggtgggtagtttgactggggcggtctcctcctaaagagtaacggaggagcacgaaggttggctaagcatggtcggacatcatgcggttagtgcaaaggcataagccagcttgactgcgagagtgacggctcgagcaggtacgaaagtaggtcttagtgatccggtggttctgaatggaagggccatcgctcaacggataaaaggtactccggggataacaggctgataccgcccaagagttcatatcgacggcggtgtttggcacctcgatgtcggctcatcacatcctggggctgaagtaggtcccaagggtatggctgttcgccatttaaagtggtacgcgagctgggtttagaacgtcgtgagacagttcggtccctatctgccgtgggcgttggaagattgagaggggttgctcctagtacgagaggaccggagtgaacgcaccactggtgttcgggttgtcatgccaatggcattgcccggtagctaagtgcggaagagataaccgctgaaagcatctaagcgggaaacttgcctcgagatgagtcttccctgtcgctttaagcgacctaaaggaacgtttaagactaagacgttgataggctgggtgtgtaagcgtagcgatacgttgagctaaccagtactaatgaaccgtgaggcttaacctgacaacaccgaaagtgttttgtcagagagacgaaacgatgaagtcagcttgtttaagattgaattactggttatagactgtgataacagaagataacgggtaattgaaaccgaatttgcttggtggccatagcgcggtggtcccacctgatcccatgccgaactcagaagtgaaacgccgtagcgccgatggtagtgtggggtctccccatgtgagagtagggaactgccaagcattaaattaaagccttagtgtaaaaagacattaagtgcgtaaagaataagcggagcggtagttcagttggttagaatacctgcctgtcacgcagggggtcgcgggttcgagtcccgtccgttccgccaactatttaggggcgtagttcaattggtagagcaccggtctccaaaaccgggtgttgggagttcgagcctctccgcccctgccagttaccaattaagtaataacaaaatttatactactttgtagcccagttaattaactgggctttttgttatataaaaaccactatatttttctccaatccttccaactcttccaatcctaaatcgtatttataactctatgtatcatccaaatgattaatctaacattattcacataatatttttctgggtattgagtctgttattagtaataacatgtgcttcaatcatcaattttattactgatatatcaatttgactgaagcacaatgctactgatggttggagacaggttgagaaagtagttgctgaattaacacttgttgatcactggtattgagccatacagcaaatagcggtttttggatgatctctactgctgctggtgagagatcgggatataaatcgagccaatgagtaggtaaaaaagcaacggcatttgttgttttcattaactgataggcaatcatagctgaatttgttgtcaaaataggttctgtttttggtgcagagctattttgtgaaagtggtgacaaatcagcactccactcaattttgataaattgtgcgctttgctggttcaggtgtgatgctcttttcattagttgaaatgtgatattgccaattactttactttccaactcatccattttgggtgcttctgtagtaaaaagcagatctagctcacgagcatgaagttgctttactagagattgccttgtagagactctagattcaattctaagctcatttctttctaagtaagcctcttgtagccaagaggttagataagcgtcccagagcgatgctgtcgcaccaattgaaagttctgagtgttgggaggcgtggctaatttctttttttgcctgtaaccaggtattcattaatgactcagcataagggataagcctttctccagcgagtgttaagcgaatattgttacgatggcgagtaaacaaatttgtcccaagttgggtttctaattggcgtattctaaaactgaccgcagactgtgttaaataaagagattcagcggctcggccaaagtgtcttgtcttactgacttccaaaaaggttttcagtaattcggtatccacatctatctccaaaaaaatttgtcgttacgatttaaatattttgttttacagaaccgcatgactccctaatactccgcgccataagtatgacgatagagaattaggagtgtgtcagatggcagaaagttttatcacgactaatcgtttttttgacaataaacattatccgcgtggtttttctcgtcatggcgatttcactatcaaggaagcccagatattggaacgtcatggtcaagctttcaatgaacttgatttaggcaaacgagagcctgcaactgaagcggaaaaattatttgttgccatgtgtcgtggcgaacgagaagcagctactgttgaagaaaaaatttggaagaaatataccagtcgtataagtcgtccaaaacgttttcataccttatcgggtggaaagccacagctcgatccatctgatgactataccgattctgatgattaatatcattagttttaatttaaaaggggcgtatttcgctccttttttacttacccttctaactgtttttgtaaatagatcatcagtctatccatggcgcgaaaactcaacgcttcaataagatgatttcgttgtattttttgctcattctcaagatcggcaatagttctcgaaactcttaaaattttgtgccatgcacgaatagataagcctaatttattcaatgtctcttcaagaaagagtgcatctttggtatgtaattgacaaaaatgttcaatctctttacttgataaataagtattaagcttgccacttcgctggaactgacgttctctggcttgtaaaactcgagctcgtatgatgctactcgattcatttgtatgagtcgattgtagtagtgcaccttgaggtaataatggcatttcaacggataagtcaaacctatctaaaaaaggtcccgatactttgcttaaataacgtaatacttgttttacgggcgttcgattatgagtaccttgatagtgccctgtaggacttggatttaatgcaccgacaagtaacacatttgcgggatagctaattttggctttagcgcgtgaaatggtaattttgcgcgcatcaagaggctctctaagtgcatctaacacacgtctatcaaattccggcaattcatctaaaaataaaatgccatggtgtgcaagtgtaatttcaccgggtttaggaatagatccacctccggttaaagcaacggcagatgccgtatgatgaggtgctctaaaaggacgtaaaggccatttaccatcatgatgtatcgtatttgataggctactgataattaatacatcaagggcttctttagctgtaagtggaggtaagagagtattaatgcgttgtgccaacattgtttttcctgtgccaggagggccaagaaataaaatgttgtgatttcctgctgcagtgatttctgcagctctttttgcgttattttgtccaataatatcactaatatctttattattttggttttcaattgttttgtgattaatattgtttttagcttcaattaatggagtgttattttctaaatgatgacaaatatccaaaagatggctagctaataacgcggatttattaggtaagagcgaaacttctgattgatgttcaatagaaatgatagatattctattatctttgttggcgcttaaaattgagggaataaccgcattcactttttgtaatttaccggaaagtgcaagctcaccgataaattcataactatttaatttatcagagattaattgctctgaggcaattaagatagctaacgcaatgggtaaatcatagcgggctccttctttaggtaaatcagcgggtgaaagattaatcgtaattctttttgctggataactatatccactatttattaatgcgcttcttaccctatctttcgcttcttttacgacagtttcaggtaaaccaactaaagtgagtcctggtaatccctggctaatatgagcctcaatagtaataagtggtgcagagatccctaatgaggctcgcgtatatattactgctaatgccatttttttattctccattattttctctctttttaatttatttttattgaggtgttaaataagaagttaattaaatgagagatatctcgtgaatatttaatatattgaaaaatatagaaaataaataaagttaaaaaataattattggatgaaaaattattatttatacgaaactttttatttttgaatttaattatttctattaacagaacaaatagtaaattaatggtttttctttcagtattaaccactgcaatataattattaagcagtgttatactctggcgtgtgacggagagataaaaatagctatatgtttcatgtggttagaattattttaaaaataatcattgtcaacatgaaaatatcatggtaactctaaaaggacagagtgaaagagaacacaacacagactattttttactacagaaaaagaattttaatattatgaatactatcgtcctagtgattagcctaattattgtcagcgtggtggtgattattaacccactgtgcggggttgcactaggacgaagaaaggctaactaaactagccggatctcagaaaaacccccgcaccgaaaggcgcgggggttttttttgagccaaggattttaaagagaataaaaaagaaaataaattaatattaaacaagaagttaagacgcagggtgaaagaatgaatggagcacagtggttagttcaagcattacgaaaacagcgagtggaaacggtctttggttatcctggcggtgcgattatgcctgtgtatgacgcactctatgatggcggtgtcgaacatgttttgtgtcgtcatgaacagggagccgctatcgctgctattggatttgctcgttctaccggtacaactggtgtctgtatcgcgacatcaggcccaggcgctactaatgtcatcacaggtcttgctgatgcattgttagattctgtgcctgttgttgctatcacagggcaagttgcttcaaatttaatcgggacagatgcttttcaagaggtggatgtacttgggctctctttagcatgcaccaaacatagttttctggtttctgatgtgaatgaactgccaagagtcgtatcagaagcattttcgatcgctaagcaagggcgtccaggccctgtgttaattgatattactaaagatgtgcaattagcagatgcttcacatttagctgatcatccattgccacaagagcaagagtttccctatcccgaacacgaaatcgcgcaggctctgcagatgttagcacaagcgaaaaagccgattttgtatgttgggggcggtgtagcaatgagccaaggtgttgaggcgctaagatcttttgtaaaacagacgcaaatccccgttgtttcgacattgaaggggttaggttgtgctaatgcatttgatgccaattatttaggtatgttgggtatgcatggtacaaaagctgctaattatgccgttcaacgtagtgatttattaattgctgtaggcgctcgttttgatgatcgcgtaacgggtcgtttaaatacttttgcacccaatgcaaaagtgatccatatcgatatcgattacgcagagcttaataaattaaaacaagcccatattgctttgttaggtgatgccaaagtgttattacctaagttatctcaaccgttagctattgaggcatggcaagaagaggtacagcaattaatcgctgaatatgcttggcgctatgatcatcccggtgaagcaatttatgctcctttgttgttaaaacagttatctgatgctaagcctgaaaatagcattgtgacaacagatgttggacagcaccaaatgtggtcagcacagcatatgacatttgatgcgccagaaaattttattacttctagtgggctaggcacgatgggatttggtatccccgcggctattggtgcgcaaatagctagacctgatgcgtgtgttatctgtgtctctggtgacggctcttttatgatgaatgtgcaggagttaggcaccattaaacgtaagcaattacctattaaattggtgttattggataaccagcggcttggtatggtgcgccaatggcaagagctgttttttgagcaacgttatagtgaaaccattttaacggacaaccctgattttgttgctttggcaaaagcttttgatattccggggcagcgtattacagaaaaagcacaggttgctgaagcaattaaatgtttattaaccagtgatggcccttatttattacaggtatctatcgatgatgcagagaatgtctggcctttagtcccgccgggcgcaagcaatgatgagatgatggagaaatcaaaatgaaccaacacaatatcacaattgaagcccgtttttgtccagagatcttagaacgtatcttgagagttatccgccaccgtggttttcatatatgctcaatgaatatgaatatcacagaaagtaactatattaatttagctctgactgtgagcagtcaacgacctgttgatcttttatgtagccagttaacaaagttagctgatgttgcaggtattcaggtcttacatcaacaacaaaaagaaaaattacaattcataagtgcacttagtgccatgtaaggatagaagaatgacaaagcaagctgattatatttggtttaacggtgaaatggttccatgggctgaggcaaaagtacatgtcatgtctcacgcactacattatggaacgtctgtatttgaaggagtacgttgctacgattcccataaagggcctgtcgtttttcgccatcgtgagcatatgcaacgattgcatgattctgccaaaatttatcgtatgcctgtcgcgcaaagtgttgatgagttaatggaagcttgtcgcgaaacattgcgcaaaaaccagttagtcagcgcttatattcgtcctttagtttttattggtgatgtcggaatgggggttaatccaccagaaggttataaaaccgatatcattattgctgcattcccatggggggcatatttaggtgaagaggcgttagataaagggattgatgcgatggtctcttcttggcatcgagcagcacctaatactatcccgacggcggccaaagcaggaggtaattatctctcttcattgttagtgggcagtgaagctcgtcgccatggttatcaagaagggattgcattagatgttcatggttatctttctgaaggggctggtgagaacttatttgaagtaaaagatggcgttatttttactcctccatttacctcatctgcgctaccggggatcactcgcgacgcaattattaaattagcgaaagatctcggttatgaaattcgtgaacaagtactgtctcgagaatctctctatcttgctgatgaagtgtttatgtctggtaccgctgcagaaattacaccagttcgtagcgttgatggtattcaagttggtattggtcgctgtggtccagtaacaaaagctattcagaaagctttctttggtttgtttacgggtgaaaccgaagacaaatacggctggttagatcctgtcaatccataatcataattaaatacatttattgagcgagtagttcgttccctactcgctgttattatcgcaggagtgtgaaaaatgcctaaataccgttcagcaacaacgacacatggtcgcaacatggctggcgcccgcgcattatggcgtgcaacaggaatgactgacgctgattttggtaaacctattatcgcagttgtaaattcatttactcaatttgtacccggtcatgtgcatttgcgggatttaggaaaactggttgcagagcaaattgaagctgcgggtggtgtggctaaagaatttaatactattgcggtggatgacggtatcgcgatgggacatggtggcatgctttattcgttaccttcccgtgagttaattgctgattctgtggaatatatggtcaatgcacattgtgcagatgccatggtatgtatttctaactgcgacaaaatcacaccgggtatgctgatggcgtctttgcgcttaaatatcccagtcatttttgtttctggtggaccgatggaagcgggtaaaaccaagctttctgatcaactgatcaagttagatctggttgatgcgatgatccaaggggctaatcctaatgtcagtgatgctgatagtgaacaaattgagcgttctgcttgccctacatgtggatcatgctctggtatgtttacggcaaactcaatgaattgtttgactgaagcgttaggattatcgcaaccgggtaatggttcattattagcaacccatgctgatcgtaaaacattatttattaatgcgggtaagcgtattgttgaattaactaaacgttattacgaacaagatgatctatctgcattaccacgtaatatcgctaaaaaagaagcatttgaaaatgcgatgatcttagatatcgccatggggggatcaacaaataccgttttacatctattagctgccgcgcaagaaggtgatgttgattttaagatggaagatatcgacagactttctcgccaagttcctcatttatgtaaggtggcaccaagtacccaaaaatatcatatggaagatgtgcaccgagcaggtggggtgatggggattttaggtgaattagacagagcaggattacttaatcgcaatgttaataatatcttaggcttaagtttgcctgaaacattagcacaatatgatgtgatgctaagccaagatgagcaagtgaaatcaatgtaccaagccggtcccgcaggtattcgtaccacaaaagctttttcacaagattgccgttggccgactttagataccgatcgtgaacaggggtgtatccgaagtaaagcgcatgcttatagccaagatggtggtttggccgtgttatcaggtaatttagcgcaagatggctgcattgttaaaaccgcgggtgtggatgaagataatttagtgtttagtggccctgctaaagtatacgaaagccaagatgatgcggtagaggcaattttaggtggcaaggtcgttgcgggtgatgtggtcattatccgttatgaaggcccgaaaggggggcccggtatgcaagaaatgctctatccaacctcatatttaaaatcaatgggattaggcaaagcgtgcgcattaatcacggatggacgtttttctggtggaacctcggggttatctatcggacacgtttcaccggaagcggcaaatggtgggatcattggtttagtggaagaaggggatattgttgatatcaatattccaaatcgcgaaattaacttacgggtagatgagaaaacactagcagcccgtcgtgaagcacaacttgctcgtggagataaagcgtggacacctaaagataggcagcgccaagtctcttttgctttacgtgcctacgcgtctttagcaaccagtgcagacaaaggtgctgtacgtgacaaatctaaactagggggctaactcatggcagcctttagacctttaacttcagcacccagtagtgctgaatatttaaaagccgcattaagtgcgcctgtttatgaagctgctgtcgtgacacctttgcaagagatggcaaaaatttctcagcgtttagaaaataccattttagttaaacgagaagaccgacaaccggtgcatagctttaaactgcgtggcgcttataacatgattgcagggttaacgccggagcaaaaggcaaaaggggtggttactgcatcagcgggaaatcatgcccaaggggtggcattatcagctaatcgaatgggcgtaaaagcattaattgtgatgcctattgcaacggcggatatcaaagtggatgccgtacgccagtttggtggtgaagcattgttgtatggggctaactttgatgaagcaaaagcaaaagccatcgctttggcaaaagagatgggatatacctttgtgcctccttttgatcatcccgccgtgattgcagggcaagcaacattagcaatggagctgttacaacaagacgtccatcttgatcgtatttttgtgcctgttggcggcggcggtttaattgctggggttgctgtattaattaaacaactgatgcctgaaataaagatcattggtgttgaggcagaagatgctgcttgtttaaaagcagcgttagaagcaggacatcctgttgagttacctcgcgttggattatttgccgaaggtgtcgctgtcaaacgtattggcgatgaaaccttccgtttatgccaaaagtatgttgatgatgtgataaccgttgatagtgatgcaatttgtgccgcagtaaaagatctgtttgaagacgtacgcgctattgcagagccttctggtgctttagcattagcagggctaaaaaaatatgttgaggagcatcagatcaaaggggaacgtttagcccacgtactttctggcgctaatgtcaatttccatggcttacgttatgtttcggaacgttgtgaactaggtgaaaaacgagaagcgctatttgccgttacaattcccgaacaaaagggtagttttttgcgtttttgccaaattttaggacaacgtgttgttactgaatttaactatcgttatagcgatgccgatccagaaaatgcacgtatttttgtcggtgtgcgtttaagccaagggctacaagagcgtaaggaaatcgtgcaacagctaacggaggcgggttatcaagtctccgatctctccgatgatgagatggcaaaattgcatgtgcgttatatggtcggtggtcgccctaatcagccattaaaagagcgtctgtttagctttgagtttccagaagcaccgggtgcattaatgaagtttcttaaaacattagggacttactggaatattacgctatttcattaccgaagccatggtactgattatggccgtgtgctggtggcgtttgagttacctgaaacggaagggcgttttgaacgacatttagatgcgttaggttatgaatatcatgatgagacaggaaatccgtcttttcagttatttctttcaccacaaacagccagcttagtggtggagtaggcgccaaaacgcactgatcacaggctcttgaaggcgtttgtgtaaaccacaaacgccaagttcaaagggttctaccagtgatatattatcgagcaaagagatacggtttcgtaccggctcagggcagttatcgacgacaacttgcggaataagtgcgataccacaaccaagagcaaccattgaaacaatcgcttcatgccctgaaacagtggcataaataagaggattttgaattcgatggcgtttaaaccataaagcaatgcgctgtcgtgatgggccgtgttcaggaatgataaagggaatattgagccaatccggtttttcttgtgtagcaaggtgtcgaacattacccggtagagcaggggcaataagaactaaggggatctcgcctattttctcaaagcagatattttcaggcaacttctctggctttcctgcaatacctaaatcggcttcatctgagataactttatccacagcatctgcggcatcaccggtagtcaattttatctcgactaagggattttctgcacgaaaacggtcaaggatcggcggaaggtgactataagctgcagtgactgaacaaaatagacgtagctctccagataagctaggactgttctggtttagcgtatgtttgagttgcttatattgcaataaggtgtgttgagcataacgtttaagttgctcccctgcatcagtcagtgtgacttggcggttatcacgcaaaaaaagtggatgccctagttgttcttcaagacgctggatctgacgtgaaagcgtggatggactgacatgcatggcttgcgcagtcttggtgaaatggcaactttcagcaagatgtaagaagagtttgagatcgcgaatatccatggtcagccgcctaggtaaatagtaaaaacaacgttgcatttattgcaacatcatcttgtaaatatatcaatttaagcaatggctttcatcccctatagtaaagtcatgcaatacctcaccgagagtggggataacaatagcaaacatatacacaacgatttgggagtcgctcatggccaattattttaatacattgaatctgcgtcagcagttgtcgcaactgggtaaatgtcgctttatgtctcgtgacgaatttgccgatgaggctaattatctaaaaggtaaaaaagtcgttattgttggctgtggtgcacaaggtttaaaccaaggtttaaatatgcgtgattcaggactggatatcgcctacgcattacgccaagaggctattgatgaaaagcgtgcttcatggcgtcgtgccactgaaaatggttttgaagtaggaacctatgaagcattgatcccgcaagccgatttagtggttaacttaacgccggataaacagcactccgccgttgttcaagccgttcaaccactgatgaagtcaggcgccgctttggggtattctcatgggtttaatatcgttgaagtgggtgaaaaaattcgtgacgatattaccgttgtgatggttgcgccaaaatgtccaggtactgaggtgcgcgaagagtataagcgtggttttggtgtacctaccctaattgctgttcacccagaaaatgatgctaaaggtgaaggtatggccattgcgaaagcatgggcggcagccacaggtggacatcgtgcgggagtgttggaatcatcttttgttgcggaagtaaaatcagacctgatgggcgaacaaactatcctgtgtggtatgttacaagccggctctctgctgtgttatgacaaaatggttgctgaaggtgttgaaccgggctatgcaggtaagcttatccagtttggttgggaaacgattacagaagccctgaagcaaggtggtattaccttgatgatggatagattatctaatcctgccaaaatgcgtgcttatgctttatcagagcaattaaaagagattatggcaccactgtttgctaaacatatggatgatattatttcaggtaaattctctgaaaccatgatggcagattgggcaaatgatgataaaaacttgctgacatggcgtgaagaaacgggtgcaagcgcatttgaaaattatccggaatatgaaggtaaaatcagcgagcaagagtattttgatcatggcgtattgatggttgcgatggttaaagcgggtgttgagctggcgtttgatacgatgattgaagctggcattatcgctgaatctgcctattatgagtcactgcatgaattgccattaatcgcgaatacgattgcgcgtaaacgtctgtatgaaatgaatgtggttatttcagataccgcggaatacggtaactatctgttctcttttgctgccgtgccgatgttaaaagagtttatgacgacgttgcaaagtggcgatttagcgaagcatgttccagatagtgggacagataatgctcaattgcgtgatatcaatgaagccattcgtcagcaccctattgagattgtcggtaagaaattaagagggtatatgacggatatgaaaaagattgctgttgccaactaatttttcgtcgctctttacgcgataagtgcgttggctgcactcggttacccaagtcacatactaatgtatgctccttgggataacctcctttgccgccttcttctcacgcaaatagcttagaaaaataagtactaatatattttaaaagataaaacagaatataagtttatccaaagcaccgtaaaaccccgtccttcaggtcggggatataaggcgcggttttttaactaactaggtgtttcctgttgctcaatatactggcagataatggatattggtgcgccaccacaactccccgcgaaataactcggcgaccaaagaacccccttgtagtaatcacgttgggcaatatcaggacgatcacgtcgaagtaatcgactcgatacccctttaaggctgttaaccagattagatatcgccagttttggcgggtaattaatcagtaaatgaacctgatcccgctccccatccatttcaacccgttcaacatcaaaatcagcacaaacactggcaaagtagcctcgccatttttcaattgcatcctgatcaaatattttttgccggtattttgtgacaaagaccaaatggacgtgtatcaggaatacacaatgtttgccacggcgaatattagtttcatttttcatagaccaaagtataataggtaatatgaaacgtctacaagcctttaaattccagttaagacccaatggtcagcaagagcgtgagatgagacgctttgcaggggcttgtcgttttgttttcaatcgggcattagcacgtcagaatgagaattacgaagcagggaataaatacattccctatacaaaaatggcttcatggctcattgagtggaaatctgacacagagacacaatggttgaaggaagccccatcacaaccgttacaacagtcacttaaagatttggaacgggcttacaagaattttttccagaagcgtaccgcttttcctcgattcaagaaacgcggtaaaaatgacgcttttcgttacccgcagggcgtgaagctcgatcaatctaatagtcgtatatcgttgccaaagttgggatggatgcgctaccgcaacagtcgtgaagtcgtcggagaagtgagaaacgtcacggtcagtcagtcatgcggtaaatggtacgtcagcattcagactgagtatgaagcgacagaaccacaacatgaatcaacctcaatagtcgggcttgatgcaggcgtgacaaaacttgccacgctttcagacggtacggtatacccgcccgtcagcagttttaaagtaaaccagcgaaagctggcaaggcttcaacggaaattaagccgtaaaatcaaattcagtgccaactggcaaaaacaaaagcgcaaaattcaacgtctgcattctcatattgccaatatcaggaaagactcccttcacaaagtcaccagcgaaatcagcaaaaaccacgcaatgattgtcattgaggacttaaaggtcagtaacatgtctaaatcggcaaaaggtacgacagaacggcatggatggaacgtaaaagcgaaatctggtttaaaccgcgcaatactggagcagggctggtatgaaatgcgccgtcagtttgagtacaagcagctctggcgaggtggtcaggtactggcaataccccctgcctacaccagtcagaagtgcgcttgctgtggtcatacagcaaaggaaaaccgccagtcacaaagtcaattcgagtgccttgaatgtggatatacagcgaatgctgatatcaacggggcacgtaacattttagcggcaggacatgccgtgcttgcctgtggagggagggtgcagtcagaccgcccgtcgaagcaggaacccgccgaggtgattcagacatcagtctgaacgcagtagggatccacgtcctttagggcgtggaggatgtcaatatcttgaaatagatagtttagaaaaataagtgctaaatatattttaaaaagataaaaccacatatctatcaatttgatatgtggtttttatttaaataaatcagaatgtgagccagttctgtcaaaatgaacagtatcattgtctattttataaataagtagccaatcaggttcgatatgaagatctcgacgaggcttccagtttcctgttaatggatgatctttcaattgagcaggtagtcgttttccttgcactaatagtaatataatctcttttagtttattaatatcctttcctcgcttttctgcgagttttaagtcttttttaaattgtcctgaataactcacttttcgcgtttagatatccaattttttgaataaatcatgggcatcttcagcataaaaaacatcatcacctttatctgtttttgcaaaagtgtttaatgttttttcatttggttgtgtttgattactttccacataaactcgaatgagatctcttaagatttgagaggctggtctgtgtttatttcgagctattgcaacaaaagcctctttgagctctatatcaactttagtggctattaattcgctttttatactcataatatacacctccatatttgtttgaatattatacaaagtaaaactttattaaacaaggttaaacttcctttacctagagaaataaagctcaaaaaactgaaccattttcctatgcgctttctgctacaatgactccccgtgatattcttggttaatgaagtttggaaaaagtatgcgattaaatcccggtcagcaaaaagcagttgaatatgtgtcaggtccttgtctggtcttggcgggagccggctcgggtaaaacacgggtgataaccaataaaattgcttatcttattcgtcaatgccgttattctgctaagcagattgctgcggtgacttttaccaataaagcggcgcgtgaaatgaaagagcgtgttgctcaaacattgggaaaacaagaggcaaaaggattaatgatctcgaccttccatacattaggattggagattattaagcgagaatacaaagcattaggcataaaatccaacttttctttgtttgatgatcaagaccaatccgcattattaaaagaattaacggtagatttattagaagaagataaagatttgctatcacagttaaagagtcaaatctctaactggaaaaatgacatgctcacacctgagcaagtgattggtagagcacaatcgcagcaagatcatacttttgccgagtgctttcgacgttatgagcaacatttactaagctgtaatgtattggattttgatgacttaatcagtaagcctaccttgctattacgtactaatgaagaagtaagggcgcgctggcaacagcgtattcgttatctgctggtggatgaatatcaagataccaatacaagccaatatgagttggtgaaatggttagtgggtgaaagagcccgtttcactgtggtgggggatgatgatcagtctatttattcatggcgtggtgcgcgtccccaaaatctggtgttattgcaaaaagatttcccacagctaaatgtgatcaaactggaacaaaattatcggtcatcagggcgtattttaaaatcagctaatattttaattgaaaataatccccatgtatttgaaaaacggctgttttcagaattaggttatggggatgagctacgagtattaaccgctaataatgaagagcatgaagctgagcgtgtagcgggggaactgattgcccatcattttattaataaaactaattataaagattacgcaatactctatcgaggtaatcaccagtcgcgtatttttgaaaagtatttgatgcaaaatcgcattccttatcgcatttcgggtgaaacctcgtttttttcccgtgaagagatcaaggatattttggcttacttaagagtgatcactaatccggatgatgatgctgcattcttacgtatcgtcaataagcctcgtcgtgaaataggcccgatgactatccaaaagttgggggagtgggctaaagtccgtgataaaagcttatttaatgcctgttttgacttgggattaagccaaacgttaacagggcgaggtttaagtgcattacaggctttttcacagtggatggcgcgaattgtacaacaatcagagcgtgagcctttgctcgctgtacgtgatttgcttcatgaaatggattatgaaagttggttatatgaaacctctagtagcgcgaaagcggctgaaatgagaatgaaaaatattaaccagcttttttcttggatgagtgaaatgcttgagggggatgagctacatgaacccatgacgctctctcaagtggtcaaccgttttactctgcgcgatatgatggagcgtggtgaaaccgatgaagagttagatcaagtgcaattaatgacacttcacgcctcaaaaggactggaatttccacatgtttttctggttggcatggaagaggggatcttgcctcatcaaagtagtatcgatgaagataacgttgaagaagagcggcgtttagcttatgtcggtattactcgagcacaaaagacattaactttcacattatgtaaagagcgacgtcaatacggtgaattaattcgtccagagcccagtcgttttctatatgaattgcctcaagacgatctccattgggataccaataaaaagaaagtgttaagtgctcaagaaaagcaagaaaaagggcaaaaaggggtcgctgggcttaaagcgatgctggcgagacataaaccttagctgtctgtcagtaaaaaataaaatcccttacttgcatgataagtaagggattattttgaatctggttagacgttttaacctatgcgtgagttattttgctcttcaagcattaatggccaatgaacgtagctttgtaactgtatctcttcatgaagattttccgcacgtaaaggatgttcagcgatccattgatgtggcaaggtaatgattaatttttcatcttccgtacgtaaacgcagtgcaggtaaagtatcatcacgacgacgactggcaaaaataattgctaggcgaagtaaacgtaccaagcggtatgcttgatttatcggtagcgcattttgctgattcaaaggtgcgagatcgataatccccttctgatttcttaaaaatgaggcgattaaacgtcgttgcgcgggtgtataaccaggtaaatcaaggtgggaaactaaataactggcatgtgaaggcgcttggcgaaaatcaacacttaagccgatttcatgtaaggcacaagcgctggaaagtagctctcgacagcgattatctaattgccaacttttactgacttgaatgaaaaaatgctctgctaattgttgaacacgatgggcttgctcaatatcaatttggaaacggcgctgaatattacgcaaagtacgttgacgaatatcttgctcaataggtaaatgcaacataccgtagactaagccttcacgtagtgcaccaccggctaagatcatattttcaatatgcagggtttcaaaaatagcgatcagaatggctaatccgctagggaaaacaagcgctctttcgaaagtaaggccttcgatttctaactcttcaagcttgccacactcaatggctttttgtttcagtcgctctaatttaggtaaggtaattaattcatccattccttgagcaatcatgatctcttgtaatgcttgaacggtgcccgatgcccctacacaaacctgccaaccttgttggataagtttttctgccacaggtgcaaggatagcttttgctgcctgttgtgcttgagcaaagttttcttctgttaatgagcgatcgctaaaatagcgctctagccatgttacacaacccatgctcaaactcattagctgtgtcgttttagcccccgtaccggtgactaattctgtgctaccgccaccaatatctaccaccaagcgctgttctgcaccacccgttgtatgggcaacaccacgatagataaggcgtgcttcttcctcaccactgataacatgaaccgtattgcctaatatttcagacgctttagcgacgaaaatatctgcatttttagcaatacgtaaggtcgcagttgcaacgactcggatttgttctgcgggaatatctctgagatattcagaaaacagtcgcaagcattgccaaccacgctccatagcctgctctgacagctcgttttctttatttaggccagcagcaagtctgactttacgtttaacgcgagataatacttggatagatcccgcgatttcacgaacgactaacatatgaaagctgttagagcctaaatcgatagcagcataaagtgatgaggatttcagcataatttatgagtgactcgggcgtttattacggttattacgttgagtattatttcctctacgaggtgccgaattattacgacgaggctgaccttgacgaggacgatgacgacgttttggctcaggtaaatcagttaataatgcatcactgttatatttactaacaggaatagcatgttgaatataggtctcaatcgccggtaaattcaacgcgtattcttcacaggctaagctaattgagttaccacttttacccgcacgtccagttctacctatacggtgtacataatcttcacagtcatcaggtaaatcatagttaaagacatgtgttacagaaggtatatgaagaccacgagctgcaacatcggttgccacaagaatatcaatattaccttgggtaaaatcttctaggatacgcagacgttttttctgtggcacgtcacctgttaatagacctacgcggtgtccatctgcggcaagatgcgcccaaatatcatcacaacgatgtttggtgttagcaaaaataatacagcgctctggccactcttcttcaattaaggtttgcagaagacgcattttttcttcattagaaggatagaacagctcttcttttatgctaaacccagttttttgttcaggttcaacttctacatattcagggttattcatctgctcgaaagctaactctctgacacgatatgagagtgtggcggaaaagagcatattcatacgctctgcggcatttggcatgcgacggaataaccagcgaatatctttaataaagcccagatcgtacattctgtctgcttcatcaagtacgacaacttgaatagcgttaagattaatgtgaccttgttttacatagtcaattaaacgacccgtggtaccgataacgatatctacaccgttatttaatactttaagttgttcgtcatagccatctccaccataggctagacccattttaacaccagtgctttgtgctaaaggttgtgcatctgtataaatttgcacagctaattcgcgcgttggcgccataatcagtgcacgaggttgattcttttcatgcccttcttttgcagggtgagttaaaagataatgaaacgtcgaggttaaaaacgccaacgtttttcctgttcctgtttgggcttgcccagcaatgtcatgacctttcacagtgataggtaacgtcaatgcctgaatttgtgtacaattagagaacccttttttctcaagggcttctatcacttttggatgcaaggcgaagtcggaaaacttcttttctgtcaaatatgttttgctcataatgtaatagaatatcagttataggttgcattacaaaaggatatccgctgaaatgctgatagtcttttgttatttaatgttacactggtacggtcaatattattctttggagtagaacaatgagcgataaaatccttcacttatctgacaacacattcgatgttgatgtattacaagcaaccggccccgtgctcgttgatttctgggctgaatggtgcggcccatgtaaaatgattgctcctattctagatgaagttgcaacagaatacgcgggtaaattaacagttgcgaagctaaatatcgatgaaaaccctgcgacagcaccaaaatacggtattcgtggtatccctacactgattttattcaaaaatggtgcagttgctgcgactaaagttggtgcattgtcaaaaactcaattaaaagagttcttagacgaaaacatctaatttgatttaaagcaccaaaataacgaaggacgtttagatcttgttggtatttctgttactgaccgctagacgtccgcttcgaagcatgataagttagcgccacttacttacataatatagcggattttattggtcatatgatatgacatggttaataagtctgagatattaaatatcaggttcagattgttagagctttgatataaactatttgaatattgtatttgaataaactataagtaatctgaattcatctaaccagtccggttgtcttagaataatctatagtattcaaggaatataatttttctatatatgttcctaacccataactgaaagtacaatcatcttgttacggcaatggatgtcactttctggggacagtgttgtgactggtctatatagcattaacatgctttctaacattatcacgatgtttatactgatgttataaagtagtaatctgtaattttacacatgacgaaactgacagcgattcgctgttatactattcacgttcatagttcgagagttaccccgagttattaagaacccaccattatgaatcttaccgaattaaaaaatacgccggtatcagaactgatagcacttggcgaaaatatggggctagagaacctagctcgaatgagaaaacaagacatcattttctctatcttgaagcaacatgccaaaagtggagaagatattttcggtgatggagtgctggaaatactacaggatggctttggcttcctacgttcctcagacagttcctaccttgctggcccagatgatatctatgtttctccaagtcaaatccgtcgttttaaccttcgcactggtgataccatagcagggaaaattcgcccacctaaagaaggtgaacgctattttgccctccttaaagtgaatgaagttaactttgacaaaccagaaaacgcccgcagtaaaatcctctttgaaaacttaacaccattacatgctaataaccgcttacgtatggaacgtggtaatggttctaccgaagatttaactgcccgtgtactcgacttggctgcacctattggtcgtggacaacgtggtttaatcgttgccccaccaaaagcgggtaaaacaatgttgctacaaaatattgcggccaacattgctcataactatcctgattgcgtattaatggtacttcttattgatgaacgtcctgaagaagtcacagagatgcaacgtttagttaaaggtgaagttattgcctctacctttgatgagccagcatctcgtcatgtgcaagtagcggaaatggttattgagaaagccaagcgtttagtagaacataaaaaagacgttatcattttattagactctattactcgtttagcccgtgcttataacaccgtagtaccttcttcaggaaaagtattaaccggtggtgtggatgcgaacgcgctacatcgtccaaaacgtttcttcggggctgctcgtaatgtagaagaaggtggtagtttaaccattattgcgactgcattggttgatactggctctaagatggatgaagttatctacgaagagtttaaaggtacaggtaatatggaattacacctgtcgcgtaagattgcagaaaaacgagtattcccagcaattgattacaaccgttcaggaacacgtaaagaagaattactgacatcgcaagatgagttacaaaaaatgtggatcctgcgtaaaattatccatccaatgggtgagattgatgcaatggaattcctcattaataaattagcgatgacaaaaacaaatgaagaattcttcgactttatgaaacgctcataaagtgttattacaaaattgagagagacaacaaaaaaagaaaaaattgtgttgatgatagaaaaataagtgatatcacaccaatttagaggttgttaaactcatttactttgtgtaattaacgatatgataaaaacgccacaagtcagtggcgttttttttacattggacttaggtcttttattatcatcgcaaaatgataatttggtatgtatattgcatatttatagttttaataaaaatagcgataacatcaataaaaatagttaaggaaaatttattattgataaagggtggtgggttactgagtaaactcgtcgtggtacaagctggagaaagaataaaaaacacatggatgggtaaataaccagctatatttattatagagaacagtactgtggatatactaaaaatgagcacaaatgttttttacgtgttcctattttctttcgctttcctatttgtagctcgtaaggtggcaaagaagattggactcgtagataaacctaactatcgtaaacgacatcatgggttgatcccccttgtaggtgggatttcagtctattttggtattgttttcgctttttatgtttcagatatctacattcctcacaaagagctgtatttgatttgtgcggggatacttgtttttatcggtgcgcttgatgatcgttatgatatcagtgtcaaaatcagggcaactatccaagcgttagtgggtattgctatgatggtattcggtggtttaaaacttgaatcacttggtcatgcttttgggccttgggatatgcatttagggccttttggttatatcgtcacgctatttgctgtttgggctgcaatcaatgcctttaatatggtggatggtattgatggtttattaggcggtctttcttgcgtttcgtttggtgcgctgggtattttactttaccaaagtggaagctctgcacttgcgttttggtgcttctcatttattgccgcgattttaccttatatcatgttaaaccttggtgtttgtggtaaaaaatttaaagtctttatgggcgatgcgggaagtacgctaataggctttactattatttggctattaatttcctctactcaagttgatcctcatccaatcaatgcggttactgcattatggatcattgctattcctcttatggatatggtggcaattatgtaccgccgtttacgtaaaggaatgagtcctttttcaccagaccgtcaacatatccaccatttaattatgcgagcaggttttacccctcgccaagcttttgttttgatcacgcttgcagccgcggtgttggccgctattggtattattggtgaaaacttatcttttgtaccagaatgggtaatgttggcattgtttttgcttgcttttgttatgtacggttattgcattaaacgcgcgtggcgagtcgctcgttttattaaacgatataaacgtcgcctacgtaaagcgacacaacttaagcattaaataagcagaggtcttttaacgtgatgaactcggaaaataacgtctcccgacaggggttttcacccgataatgaactcgatattcgaggtctttgttgtgcactatggtcaggaaaacgctggataatagggttcgcgctgctttttgcgctgattgcattaggggcatcttacttgatgcaacctaaatggagcgctattgcgatgacagagagacctactgtgaataatttaggtagttattattctcagtctcagttcttacgtaatcttgatacgcaaattaatccgtctgtaactgtttctcagttaagtatccctgatgaagcttatcaagagtttgtaacacagatttcagcttttgatacacgacgtgagttttggctgcaaacggattattacaaacaacgtaaagaaaatgatgcgcaagcagacgcggcattattagatgagctcatcaataatattcaatttacaccggctgatgagaagaaattggttaatgatcaattgaaactcattgctgaaacggccaacgattcgagtcaactgctcaatgaatatatcgcttttgcgaataaacgtgcggcagagcatctaaatgaagaagtgattgccgcatgggcaactcgaacacaatcgatgaaagccttagtgaaacgccaagaaatggccgctcaagctgcttatcaacgacaaattaatttactcaaacaatcgattaaagttgctgagaaacaaggtatttctcaaaaacagacctcgattgcgatagatgaattaccggattcgaagctgtttctactcggcgtgcctttattgcaatcacagttagaaacattaatggcaacaggaccagattttgatagtgattatgatcaaaatacggcaatgttatccaccctcgcggtaggtgctaaattacaagataacttccaaacttaccgtttcttacgtacacctgaagatcctgtgaaacgagatagtcctcgccgtgcctttatgatggtgctttggggtgctattggtgttttagtgggcgcgggtgtggcattagtcagacgtagttcattaaaaaaataatcattattacctttttatcattttaataataacgagacatcaggtgtattttcacctgatgcccctgagaataagggcatattgctttcccaaaaataagcaatataacaaagaaaaaagagagccactgtgaaagtgttgactgtttttggcacacgccctgaagcgatcaaaatggcacctttagtgcacgctttagcaaatgatgattcgtttgaggcgaaagtttgtgttacggcccaacatcgagaaatgcttgatcaggtattaaatcttttcgagatcaaaccagattatgatctcaatattatgaaaccaggacaagatttaacagatataacctgtcgcattttagaaggtttaaaacctgttctagcgtcatttcaacctgatgttgtgttagtacatggtgatacaaccaccactatggcggcaagccttgctgctttttatcaacaaatccccgtcggtcatgttgaagcgggattacgtaccggtaatctctattctccttggccagaagaagcgaatcggacaattgccggccatttggcgatgtaccattttgctcccactgaaactgcaaagttaaatctggtgcgagaagcggttgcggataaaaatatttttgttaccggcaataccgttattgatgcgctattttgggttagcgagcgagtgatgggaaatcaaaccctgctcgatgaacttgctgtgcaatatccctttattcagccagaaagaaagatgatcttagttacgggacatcgcagagaaagctttgggggtggttttgagcgcatttgccaagcattagcagagattgcattggctcaccccgatgttgaagttgtctatcctgttcacttgaatcctaatgtaagtgaacccgtaaagcgtattctgcatggaattaataatattaaattaattcaaccgcaagattacctgccttttgtttatttaatgaaccacgcttaccttattttaactgattcaggtggtattcaagaagaggcgccttcattaggtaaacctgttcttgttatgcgcgatacaacagagcgccctgaagcagttgaagcgggttctgtgcgtttagtgggtacagatactaaacgtattgttagcgaagtaacctctttattgacagacgaaaacgcatatcaccaaatgagtaaagcaacaaatccttatggtgatggtcatgcctgccaacgtattcttgaagcattgaaaaataatcaggtgacattatgagttttgaaactatttctgttatcggcctcggctacattggattaccaacagcggcagcttttgcctctcgtaaaaaaagtgttattggtgtggatgttaaccaacacgctgttgataccattaataaaggtcaaattcacatcgttgaacctgatctggataaagtggtaaaacaagccgttgaagaagggcatttaaaagcctataccacaccacaacccgcagacgcttaccttattgcagttccaaccccctttaaaggcgaacatgaacccgatctggcttatgttgaagccgctgcgcgttcaatagcacctgtacttaagaaaggtgatttgattattttagaatcaacctcacccgttggaacaacagaacaaatgtcacagtggcttgcgcaggctcgtgaggatttaactttcccacatcaacaaggtgaaaatgccgatattgatatcgcttattgccctgagcgtgtattgccaggacaagtgatggttgaacttatccgcaatgaccgtgttgtggggggcatgaaccgtaaatcatcagagcgtgccagcgagttatacaaaattttccttgaaggtgaatgtgttatcactaatgcccgtactgcagagatgtgtaagctaacagaaaatagcttccgtgacgtgaatattgcatttgctaatgagttatccctgatttgtgctgaccaagatattaatgtgtgggagctaattagtttggctaatcgtcatcctcgcgtgaatattttacagccgggtcctggtgtcggtggacactgtattgccgttgatccttggtttatcgtgtctcaaaatcctaaacaatcacgcttaattcatactgcccgtttggtcaatgatggcaaacctgtatgggttatcgaccaagttaaagccgctgtggcggattgtttaactgaaaccggtaaacgtgctaacgagatcaaaattgcctgctttggtttagcctttaaacctaatattgacgatttacgtgaaagtccagcaatgaatatcacccaacaagttgctaactggcatagtgggaaaacatttgctgtggagccaaatattcatgaattaccgactaaattaaaaggtatcactgaattagtctctacagagcaggcattaaaagaggcggatattgttttaatgttagtcgaccatcaacagtttaaagcgatacctggtagccaagttacccaaaaatggattgtcgatacaaaaggagtatggcgttgagacgtattttagtcacaggcggcgccggttttatcggctccgcggttgttagacatattattgataacaccaatgacagtgtcgtcgtggtagataaactgacttatgcgggaaatttagagtcacttgcccctgtggcgaacagtgaacgttacgcgtttgaacaggttgatatttgcgatcgcgctgcacttgatagtctatttgcgcaatatcaaccagatatcgtgatgcatttagccgcggaaagccatgttgaccgctctattgatgggcctgcagcgtttattgaaactaatattgttggtacttacaccttattagaagctgcacgtcatttctggtcagtattacctgaagataaaaaagcggcatttcgtttccaccatatttcaactgatgaagtgtatggcgatttagaaggaacggatgatttctttactgaaacgacaccttatgcaccaagtagcccttattcagcttctaaagcatccagtgaccaccttgtacgagcatggttgcgtacctatggcttgccaacattgatcaccaattgttcaaataactatggcccttatcattttcctgagaaattaatcccgctgattattttgaatgcaatttcaggaaaaccactgcctgtttatggcaaaggtgaacaaattcgcgattggctctatgttgaagatcatgcccgtgcattgtatttagtggcaacaacggctcaaccgggtaaaacatataatattggtggtcataatgaacgccgtaatattgatgtagtgacaactatttgtgaattgctcgaagagttgcatcctaataaacctgctggtgtggcgaaatatgttgatttaattacccatgtaaaagacagaccgggtcacgatctacgctatgctattgatgccgctaaaattgcagcagagttaggttggaaaccacaagagacctttgagtcaggtattcgtaagactgtattgtggtatttaaataaccaaacttggtggcaacgagtactagatggctcttatgcaggagagcgtttaggactgggtgattgattacgtgaaggataaatgatgaaaggtattattttagcgggtggctctggtacacgcttacatccgataacgaaaggggtatcgaaacagctgttacctatctatgataaacccatgatctattatccgctctcagtacttatgttagcgggaattcgtgatattttgattatcaccactcctgatgatctcacttcatttcaacgtttattgggtgatggctctgcatttggtgtccatctgcaatataaagttcagccatctcctgatggcttagctcaagcctttattttaggggatgagtttattggtgatgagcactgttgtttagtcttaggcgataatatctattttggtcaagggtttagccccaaactaaaacaagttgctcaacgtcagcggggcgcaacagtatttggttatcaagtgatggatccggagcgcttcggtgttgttgaatttgatgatgatttcaaagtgctgtcaatagaagaaaaacctcaacagcctaaatcgaattgggcggtcactgggctttatttctatgataaccgcgtggttgattttgcgaaaaaggtgaaaccttctgttcgtggtgagcttgagataacctcgattaatcagatgtaccttgagtgtggtgagcttaatgtggagctattgggacgcggttttgcttggttagatacggggactcacgatagtttaattgaagccagtacttttgtacaaaccgttgaaaaacgtcaaggttttaaagtggcgtgtctggaagagatcgcttggcgtaatggttggttaactgacgaacaagtcagagaaagcgcaaaatcactcgccaaaacaggttatggccgctatctattggatttattacatgtccgtcctcgccaatattaattatcttgagtgggagagcgattttttctccctcaatacaggccgtcttgagtttagtgctcaagcgcctgttttaacacaagataggcttgagcaatttacggttgttcatgccaaagttgcttcctatgatcttctactgattgataacttaacgcaattaggatttcaattcgctgaaggtgaaatagatttcaaattgccaattggcacagaaaatgcttgtgaaaatattgctgaaatacattttcgcactgccaatgaaactgatatcccattattaatgacaacggcttctgcggcttttgtacaaagtcgctttcgagcgccatggtatcaagaaggtgatagcagccgtttttatgcattatgggtaaaaaaagcggttttaggcactttcgatgatagctgtttattgacgatggatcgcgaaaataaggttacagggtttgtaacattacgtcggatttctgagagtgaagcaagagtgggattacttgctgtaatgcccaatagaacaggacaaggcattggtaagcaactgatgtcggtggcgaagtattggtgtcaacagcaaggtctatcaaccctctatgttgcaacacaaattagcaatattgcagcttcgcgtttatatacacaaagcggtgctttaattgatagcactacttattggttatacaggggataatatgattccgtttaataaaccacccgttgttggcacagaattagagtatatgaaacaggcgatggaaagtggcaagctctgtggtgatggcaacttcacaaaaaaatgtgaaaagtggttagaagaacaatttcattgtcataagacgctgttaacaccttcttgtacagcatcgttagaaatggcggctatccttctggatatcaaacccggcgatgaagtgattatgccgagtttcacttttgtttcgacttcgaacgcctttgttttacgtggtgcaactattgtgtttgtcgatattcgtccagacaccatgaaccttgatgaaacaaaaattgaagcggcgattacggagaaaacgcgtgcgatagtgcccgttcattacgcaggtgttgcctgtgaaatggataccattatggcgatcgccaaaaagcataacctgtttgtcgttgaagatgctgcgcaaggggtaatgtcgacttataaaggtaaagccttaggaactatcggtcatattggttgctatagctttcatgagacgaaaaactattcatcaggtggtgaaggtggggcaacactgattaacgatccggctttaattaatcgtgcggaagtgatccgtgaaaaaggcaccaatcgtagtcaatttttccgtgggcaagttgataaatacacttggcgtgatattggctctagctatttgctgtctgatttgcaagccgcttatctttgggcgcaactcgaacaagccgataaaattaatgaacgtcgtttagcattctggcaaatctattacgatgcattaacgccgttagccgaacaaggtttgttaacattgcctgttgtaccagacggtttagagcataatgcccatatgttctatattaaacttaatgatatagagcagcgtacggcttttaatgagtatatgaaagcacagggcgtcttaacggtattccactatgtatcactgcatacgagtcctgccggaatgaagtttggtcgttttgatggtaaagatattttcactacacaagagagtgaacgcttggtgcgcttaccgatgttctacaacatgactgaagaagagcagcaaaccgttattcatcatattcgtcatttctttgcttgatatgtcgttagctaaagcttcaatttggacagctgggtcaaccttgataaaaatcggggctggcctgttggtcgtaaagttattggcggtctcctttggtccctccggagtgggacttgcgggtaacttccgccaattaattaccgttcttggtgtactgtcaggggcgggtatttttaatggtgtaacaaaattgattgcgcaatatcaagatgatgcaatacaacgcaaaaatgtgttgggtacatcatcatcaatgatattgctgttttctacactacttgccattttatttcttatttttaccacaccaattagtcgcgttttatttggtgatgactatctgcaatatctagatattgtcagaatggttgcctttattcagatgggtattgcctatgccaactattttctggcgatattaaaaggttatcgagatgcatctggaaacgctttagcgattattgcgggaagtttaattggtgttattgcctattatctctgttatctcattgccggttatcatggtgcattaattggcttagctttagtacctgcactgattttattgccagcgatggttatcttaataaaacgtaagcgttttgctctcagtgaattaaaaccaagttgggataaggctatcgctagtcatcttggtaaatttaccattatggcgctactgacttctatcactttacccgtcgcttatatcatgatgcgtaacttgttagcagaacattatagctgggatgatgttggcatttggcaaggggttagcagtatatcggatgcttatctacaatttattacagcatcattttctgtttacttattacccacactttcacgattaacgcaaaaaagtgagatagccaaagagataaccaagtcactgaaattcgtcttgccagcggtggcagtggctagttttatggtttggttattgcgagattttgccatttggttgctattttctgaaaaatttatcgctatgcgagagttatttgcttggcaactggttggtgatgtgttgaaagtaggggcttatgtttttggctatctggtgattgcaaaggctgctttgcgtttttatattctgacagaagtgagccaatttgccttattaacgcttttttcacgctggcttattcctgaacatggtgctttaggtgcagctcaagcctatatggcaacctatattatttacttccttctctgtagttctgttttcgtgatttattgcaggcgcaaatgacaactttgatttacgtactaggttcagacattgtgcatcataacaacacaatgttacgcttttttaacgaccacctcgtgactgaggcggcattaacgtataaacctcgttttatcgttgccagtaaagataactcgttatcatcactttatcctcatttagagattgagtgtttagcggataaaaaacaagtcgcgcagagagtggtagcattagctaaagcagatagaaaacaacgttttctatttctggggcaatttaatgcgcctatttggcttgctttattgatgggcaaaattaaacgtcatcaattctggtggcatatttggggtgctgatctttatcaggatgctaagcaattaaaatttagactgttttatctattgcgtaaacttgcgcaaaaacgggttggacgtgtgtttggtacacggggtgatctaaattattttgctcaatcaaatgttaatatccccgcgaatttgctctatttcccaacaagaatggatccggcgttgacgcttacagaaaagaaggccgttgatcctcagcatattactattgtattaggtaactcaggcgataaatctaaccgccatatcgatgctttaaatgcgattgctgaacaatttggtcataaagcaaaagtgatcattcctatgggatatcccgctaataacgaggattatattcagcaagtatctgatgcagcgacaaacttatttccaacagaacacgttgagatattacgacataatcttgcctttgatgattatctcgcactcttaaaaacctgtgatttaggttattttattttccaacgtcagcagggtattggtacgttatgcctgttgatccaatttgggatcccttttgtgattagccgtcaaaatccattttggcaagacttaacagagcaaagtgttcccgttttcttctctggtgataaacttgatgtggcgttaattgaagaagcgcaacgtcaattattgctactggataggaagaatattaccttctttgcacctaattttatccaaggttggaagcaattgattgagatgagcacaggagacacccaatgacattggcgcaattggggggattaacccttgtctactttatctcgttggggtttattttattactgacctaccaagagtttcgtcgggtacgctttaattttaatgtcttcttttccatgctttatttgctgacattctattttggctttccattaacttgtttattagtctttcagtttgatgtggcagttgttcctgtcgatgccttattacacgctctattagccgctactagcttttatgcgatttattatgtcacttataaggtaagattaagaaaagcctctagcgagccttctaggccgttatttacgatgaatcgggtagagaccaacctaacttggatactgttagcgttaattgctatcgtcactgtgggcatatttttcttacaaaatggcttcttactctttaagttgaaaacatatagccaaattttttcaagccaagtatcaggtgtggcgctaaaacgctttttctatttttttattcctgcaatgctggtggtctatttcttaaagcccacacaacaacgttggctttttttcctttgtgcgacggtcggctttggcattttgacctatgttatcgtcgggggaacacgcgcaaatatcattattgcgtttgcactatttttatttattggcatcgtacgtggttggataaccttatggatgttaattgctgcaggtgtgatgagcattgtcggtatgttttggttagcactaaaacgttacgggcttgatgtcagtggtgccgaagctttttatacctttttatatctgactcgcgataccttctctccttgggaaaatcttgcattattgttgaataattacgacaaaatcgagtttcaaggactcgcacctattattcgcgatttttatgtgtttatcccttcatgggtttggccacaaagaccagatgtcgtactaaattcagcaaactattttacttgggaagtgcttaattatcatgcaggacttgccatttcaccaacgttaattggctccttggtggtgatggggggcgttgtatttatccccttaggcgcggtggttgttgggcttattattaagtggtttgattggctctatcagcagggtttaaatgaacacaatcgctacaaatctgccattcttcaagcattttgctttggtgctatttttaacatgattgttttagcgcgtgagggcgttgattcgtttgtgtctcgcgtggtctttttctgtttagtatttggtgcctgtttaattgcagccaaactcctgtattggttatttgaaagtgcaggattagttcgtcactatgttattaatcaagtgcgcaataaacctcgtttagaacaaaaggaaaagtaatggatacaaattcaattccgaagtattccatccgtgggcacaatatctggggatttaaagatatggcgcattttttggattatctttatcaaggtgcgcaaattaaaagtggctctttaattgcgattaatgcagaaaaaatcttaaccgcagaaacagataaaggcctaaatcagttattagatgaagcggattatttgtacgccgatggcattagtgttgttcgcggcattcgacgtaaatatcctgatgcacaagtgtctcgtattgcgggagccgatttatgggaagctttaatggagcgtgccgggaaagaaggcacaccggtctttttggttggtggcaaacctcaggtattggcgcagacggaaagtaaattaaaggcacaatggaatgtgaatattgtcggtagccaagatggttactttacgccacaagatagagatgcactttttgaacgtatcaaagcttctggggcaaagattgtgaccattgccatgggctcacctaagcaagagctatttattcgtgcttgtcggcaagtacacccagacgcgttatatatgggcgtaggtggcacttacgatgtttttacaggacatgttaagcgtgcgccaaaagcgtggcaaaatttaggcctagagtggttatatcgtttactgtcacaacctagccggatcaagcgccaatttaagttattaaaatttgttggttattactattccaataaattgtaagttgcgtgagtattttttgtcggcaataagtgttaaatagcaaaaatcgcaatctttactggtatcttgattgtttgattattatactaatggggcgttgagtgggtaaaaacgctccatttatcgacgaaatgcacaaactatcgtcaaacaaactttttttttcaaaaagcactagacagacagtgcgtaaatccgtactatcctctcccgcaacggcgtgaagcgcccgtagctcagctggatagagcgctgccctccggaggcagaggtctcaggttcgaatcctgtcgggcgcgccattaaagcgtgctaagagttacggtgaagagcgttgttgtagaagtagtaagatagctgttatggtggctatagctcagttggtagagccctggattgtgattccagttgtcgtgggttcgagtcccattagccaccccatcttatcttagtttttgtttatgcgagggtggcggaattggtagacgcgctagcttcaggtgttagtgtcctaacggacgtgggggttcaagtcccccccttcgcaccataaacaagataagagcagtcattcagacggcgagtagcgcagcctggtagcgcaactggtttgggaccagtgggtcggaggttcgaatcctctctcgccgaccaataagaaaaagcctcgatatatatcgaggcttttttgcatttattatcaagctattgacagcaatattgtcttatttcatttatattgttgtatcttccttttgtcctttctcttttgtccttttgctactgtcctaagcacaatagaccgtttatctatgattcatgattaaagcaggttgttggctcttttagtttaaaaagggagatcattaggctatttgtttacagggcagtgtaagtatattagttaaagattattaataatttgtattaccgcctgattttatactacataaaaagagcatcatgagaaagttaaataatttatgtaaccgtatgaatttaaatgaaatattttttattgtcggtaaaaaacaacacatggcaaatttgatgtcgctaaaaggtgacatataactcaatgatttttatatattatatactggtgttcgcttaactgtcgtgaaacagagacgagttggcaaatttattttttcttttttatttaacaatagcctgataaaaatacgctctctgatcttttatattttaaatacgccatacaggcgaaggcgcctaaaaaattcaattagttagttttatgctgtttgggaattaattttttattggcggaaaatacaagttggcacgctaaatgcattacttattctgtagatgctcattccactccttatgacagcatatgacttcataaacctaggaatgatgcagagccgattatcggtgcctacgtccacgttatcgatgaaacaccattcatcaccaacaggacgaaacgttgagtgaggcaccatccgtctgtagacctgattgtatattttatgcacctgtattttttaatacgggtgtttttttgtctgttttttatctcatcccttttgaattgataacactatcacgctattatccagcgcaagggtaaatagggggtagcatcacgatgataaataaccaaaaagcgtatcttgcgcaagaaaggctctttttgatagataagtttggcccattattgttttttttgatcccgctgatcatgctgattatcggtggaaaatcatgggcgaagtatgtcgcttttctgtgtcaggggatcgcactgatttatatcgtggtgttttaccaagcaagaaaatattatttgtcatttcaacatgaaaataacaaagggataccttatcgtttttatcgtatcgcttgggtctatttatttttaattttgtgtcttgaagtagtactactggttcaacacgctttttaaaagtaataaaaaaccctcaattttgtgtttgagggttttggtcaataaatgaaatgatgtatttattgcagtgctttatttgttttaggctcgtcaaaaataacagagtctttttttaacgtcattaatagcgcatctttgcgtactttggctgactcaactgatttattctgtttatctagcacatcagccaaccacgcaaaatcatgaacatctggacgctgttttaatgcattgcgaaatgctgtttctgcttgtgcccattgcccttgttgcatggcaatttgaccgacggtgctattgagtaatggtgtcggaccatgttgtttaattagtgagttaagcacttttaatattgagtctggatcgctgttttttaagcgcggtaacaataagatcaggcgttcatcatagtgacgtttgatcccatctaaaatgatcgtctgcgcagtttgcggatcgttgcactcaataaggtgttctgctaatacaaatcgtagtccattatcatgttggatcttacgaggctgtgccttccaccaatttttcagtccatcacaaccattttcggacatcttctgtcccatcagcccaatataggcttgttgacgtaattgctctaattcatcatctgtatgtagggctattttctgcattgaagggatgatatcaagtagtgcttgccaagcttctgtacgtatatacgcagtttctgctaagcgtaatacttccggatgacgaggcacttgattgagtaattcatcaaccccagtacgagcagcatggttttcattttgtgccagtaaaatgcgcactcgggtaatatcaacgggtaactgattggtatcagcaagctcagaagctcgctccagatgttgctgtactctaaactcatcaccccgttgttgtgctgcttctgctgctagtaaatagtttactacaggttgttccgcataatcggcattgcggctcatcagcttttctacttgtttgaaatcaccttccgcaagtttcattaatgctaaccgtgtttgtttacgtgctcggctgcgtttgcgcaaagagaaccaactataggctttagagcctgtaccaataaaacgacgataacaccagccaagcaagagcaatatcagttgcagtaggacaaacatgatcacaagactggtaacgctagtttcaatatcccaattatcggtttgtataaagacataaccttgatgacccgctaatacagggccgaagattatccctgcaatcaataccacaaacaggagtaagatcttgaacataaatttattctccttgtggtgctacggttgttgatgtcgttgttcctgatgttgcactatcttgtgctgcatcaaccgcataaggggcttgtgtagcttcggcatctttggcttcaaccgcttctggctgtgatgtctcgttttgggtcagcaaattacggatctgcttttctactcgtttttctaacagagagaggctttttaattctgttggcattgcaagagtaataggctgcttttcaagctcattaatactgtctaagaaagccgttgtattcggatcggtggtatcaaaataggcgcgtacccaagtagataccgcttctaatgattgttgataaatctctgtttgatggcgaggcaccgcttgagatgcaattaataaacgagagcggatattttctcgcagataaatatcttggtttggagctaatagtggaatagcggtactgtctcgacgacggatagtaataaagtcatccataaagcttttccagcttttactgaggttttgcttccagtcagaaagcgagcctgaaatggcttcatcatttttatccatcggtgagccatcacgctcaaatccagataagcgtaggttatcaacctgattagctaactgatttaattgtaaaatagtaccatcattatcaattttgctcagcgcggctaagttgccaatatcttcattaatggcgcggcgaatggccaataagcttgggtcattcatttctgctaagctactatcagcgccttttaataaacttaccgctgtgacgacatcttggtcattccataatttgcggcccgccatttttaccataaaatcagcttgtgctaatagccagctctttacatctgcacttgagatagccgcaaattgcgtttgtaaattttggatttgacgctcagtaacttggcgttcattttgcagtttatcaatagtgagtttttgtgagttaaactgactgtcaatattgtcaaaacgttgttgataagtatcttgcaattgttgtaattgtgccaattgtgattttagcgattggttttctgtacttagtttagtcgcttgttgagtggtgtaataataaagaccaccaccgattgccagaataacgaggatcgcaacggcactccctatcaaacctgaacgcttattgtttacaggttttacttcttgatagcggatatcgtcatcagcctttgatgtaccattctgcaagtcattttcattcgtatttttctgttccgtcatatcggcgtctcatttaagttctatattaatgcatgaaataaagcatcattattggcactttcagcaacggttatttttttaaagcctaatgtgctagctattgttgctaatcgtttactgaccaccactaaatgactgtttaacagccatgctttttcagatccagcgactagataaaagagttgttgcaacatttcgccactggtgaccacaaaggtatccacttgggcatttttccactttagcgcaaactcttcagatacataatcaataaatagacgctgataacattcacattcatcaacaattgcaccgcgttgacgtaatgttgtggcaagtagttcgcgaccaccattgcctcttagtagtagtactcgcttgttttctatttgttgaagtgaagacaaggccagtaggtcttcactggtttctccaaattctggataacgtatagaatgtcctgttaattgctgaaactcttcagcggtgctttgacctattccataatagaatagcgtatctggccatgattgttgtaattgatttagttgccagtttgcgtaccacaccgcatttttagaaagtaaaaaaaggtaatcacccgtacttagcttatttaatttgttttctaatatggaaagctctttacccgcggctatttctattaaaggtgcatgaaaagcatgctttcccgcatcaattaagcgttgcgtaagttgttctcctgctgggctaggacgagtgattaaaatactcatatcgctgtattaccttgatatacagcggttaaaatctctctagctcctttatctagtagctcttcggcaagagaaataccagcttgctctgcatcttcaggtgatactaagcgttcgccacgtaaaatagtttcaccatcaggggagccaactaatgctcgtagccaaattttgccgttttgccaaatagcataactaccaataggtacttggcaacccccctcaaggcgagtgttcatcgcgcgttctgcttttacacaagttgcagtatctgcgtggttaagggcggctaataaggcttgagtatcatgatcatctaagcgacactcaatgccaacggcaccttgtcctaccgcaggaagagattgttccgcagacaaagaagaacgaatacgctcagttaatttaagacgttttaagcccgcgacagcaagaataatagcatcatagtcgccattatcgagtttacttaaacgggttcctacattaccgcgtaaatcacgaataattaaatcggggcgcagtgcttttaattggcattggcgacgtaggcttgaggtaccaacgacacttccggctggcagttgttctaatgaatcataatgattagagacaaaggcatcacggggatcttctcgctcacaaatcgtcaccaatcccagaccttcaggaaaatcaatggggacatctttcattgaatgtacggcaatatctgcacgagagctgagtagtgctagttctagctctttgacaaataaccctttaccacccactttcgctaatggggtatctaagatgatgtcgcctttcgtgaccatcggtactaattcaacgactaagctcggatgagcgatttgtagttgttctttaacataaagcgcttgccacatagcaagagggctttggcgtgtagcaatacggatggtactttttgacataatattattatctcttccgagcgagttagcataatttctgtttataaataaggctttgttttaacactttaaggttcatttttccagttaaggcgtggtgtggtaaggaaacaatgaaacataaagaggttttaaatcaatattagtgaggtaaaaaataaaaaaagggaattacaaatagtaaaaatcgttatttttatctttttactgttttatatctatataaaaagtgtggttatttacaacatttaaacattaaattaatttatttaacaatagtgagaggagagaaaggagagacttacagaattttctgaacacattgataaaacaaccattattttaaggtgacccttttctatctattttttctataatataaaaccacccaaaaaattaacaaaaatattaattaataaaaaagaaataaaataattaaataaataatgaaaatttaaattttatttaaatagacaatgatgaagtttgaatatgtctttaattaattttattgtttatattgttattatttactcatttttatagataactcatagaaaaaagcaatgctatatatagttattatatatcaacgagttatgtttatttttatttttttactcttttttaggtaaaggtaagtatttttttcaacttgttatcacaaggtaactcgtcgattttagctgttttatggccgaacaacacttttttctatatgttttctctataagtaaaatagactatctctatgatataaaagtcattatttgctctgctttatacgattaagcgactaaaaaagcaatttagatcttggtgctatattttgagatcctctttacgccttgcttgcaaggtgttaaattgatcacgtttccgagattttgttagtaaagttttatctattaataattgaataattaaagctcggtaatttataaactcagattctactattttcttagtattgttcaggcgaaactcttgtatctttatattgaaacactgaagcaacggctggatgcgattaatcaactcaggctggaacgtgcatttgcatcgatgagtgatgtgtttaaacaggtgtatggtttaattcctgttttactgcattaccaccaccctcagttgccaggctatattcaaggaaatgtccctcatggtacatgtttctttgaacctgatgacgtgcaacgtcaatgggtcaataagctgactaatgcatcatgtgatgagccaatgaatggatacaccagcggagagttacctattacgggtatctattcgatgggaagtacttcctcgattgggcaaagtcactgctccgatattgatatttgggtctgtcaccaatcttggctggaccaagatgagcgtgcgcgtttacaacgtaaatgtttactgatagaacaatgggcgggagaattaggtattgatgttacttttttcttaattgatgagaatcgcttccgtcatcatgcaagtggtagcttaggtggggaagattgcggctcaactcagcatatcctgttacttgatgagttctaccgtaccgctgttcgccttgcaggtaaacgtttgttatggacgatggtaccagtagaagaagagtaccattacgatgaatatgttaattcactctatgcccaaggtgtattaacgcccaatgaatggcttgatttaggtggattaggtgagctttctgccgaagagtattttggtgcaagcctgtggcaactctataagagtgttgattcaccttataaagccgtattaaaaagtattttattggaagcctattccgcggattaccctaatggcaaattgttggcattagaaatgaaacagcatcttcatcgtggtgaaatcgtaaattacggtttagatgcatattgtatgatgcttgagcgcgtaacccgctatttagtttcgattaatgatttaacccgccttgatttaatccgtcgctgtttctacctgaaagtttgtgaaaaattatctaatgaaaaaaatgagaatgaacctgcaggttggcgacgccaagtattatctcagttagtcacgcagtggcagtgggatcacgaacgtttagcgatattagataatcgtgatagctggaaaatagagcgcgttcgtaacgcacataatgaattattagatacgatgatgcaaagctatcgtaatcttattcgttttgcgcgccgtaataacttaagtgtcagtgctagtccacaagatattggtgtattaacacgtaagctttatgccgcttttgaagcgctaccgggtaaagtaaccctggttaatccacagatttctcctgatttatccgagcctcatttaacctttatctatgtgccaccgggacgcgctaatcgtagtggttggtatctttataatcgggctcccgattttgcacatattgttggtcatcaaccgttagaatataaccgttacttaaataaattagtggcgtggtcttattttaatgggttacttactaaagattcacaggtttatattcatcaaggtgactcctcttgtgatgaaattaaacttcatgaattagtgcgggatatctcgagtcattttcctattcgtttacctgccccgacgcctaaagcactgtatagcccttgtgaaattaggcatttagccattattgtcaatttagaagttgacccaacagagcgtttttctgatcaagtagtgcattttgattttagaaagttggatgtatttagctttggcgaggaagagcaatgcttaattggtagtatcgatttactctatcgtaactcttggaatgaagtgagaacgctgcattttaatggtacgcaatcgatgttggaatcgttaaaaactattttaggtaaaatgcaccaagatgcggccccacctgcatcggttgaagttttttgttatagccagcatctacgtggtttaattcgtacccgtgttcaacagttagtctcagaatgtattgaattgcgtttatcaaccaatagattagagccagggcgttttaaagcattacgtattgcagggcaaacatggggattgttctttgaacgtcttaatgtttctgtacaaaagttggagaatgccattgaattttatggtgctatttcatacaacaaattgcatggattacccgttaaattaggcaaagatgcccgttatctgcccgctgtgattgatggttttgcttgtgaagggattattcagttcttctttgaaacaacagaggataataatgtctttaatatctatatcttagatgaagctaatcgagtggagatttattctcactgcgaaggtagtaaagaagagctagtaaaagatgtcagccgtttttactcttcatctcatgatcgctttacttatggctcaagctttatcaacttcaatttgccacagttttatcaaatcgtgaaagtggatggagcaacgcaagtactgccttttgctgggggatcgtttggtaagctaagtgatctaggtaaaacagcgccaaaagaagagatgagtactaagcctattcaaggatttaatgattatcaggctgtacatcatcattgataatcgacacggcaaaaccgatagagaagtgatggggactttccagcacccatcacttagttgtttgtgttaaaaagaaaatgcttcaccactttgttcgctgattgcttgagccaacatggttaaaaattccccgccactacgatcgcaaacccactgtgtacctttccaatcaaaatgataaccgccagaacgcgttgctaaccatacttgatgaaaggcttcctgacgattaatgataattttactatgattttcaaaggttaatgtcattacgccaccattgatttcacaatcaatatccgcatcaccttcataattatcaatggtttgttctatttctgacatcaattcgtcagctaattggtgaaattcactatcgttcatcttcattttcctatttgcttttcgagatctaactgcgattatagaggatattaaccaaattaatgataggcagatttcgaatgaaaacgtatttacgttgcacccttgctataataacactgatttctctttctggttgtggcttgaaaggccctctctatttcccgcctgaagatactcaggcaaatatgactcagtcatcccagccaacccagcaagttgagacttcctcaacacaaaacaattagtcaatattagaaacgggacacccgtttcaggcagggttaagatgcaattttcaaaaatgcatgggttaggcaatgactttatggttgttgatgctgttacccaaaatgtttatttttcaccagaattaatttgccggttagccaatcgacatactggtgttgggtttgatcaactgttagtagttgaagcaccttatgatcctgaattggactttcattaccgcatttttaatgctgatgggagtgaagtcgcacaatgtggcaatggtgctcgctgttttgctcgatttgtgagaataaaagggcttacaaataaaagagaaataaaagtcagtacccagtctggcagaatgaccttacatgttatggataatgaagatgtttgtgtcaatatgggagagccagagtttgaaccacaaaaagtaccgtttcgtgctcaaaaagtagaaaaaacctatattatcagagcgatggaacgaacagttctatgtggtgtggtgtcaatgggaaatccgcactgcgtgatccaagtggaagatatcaaaactgcggaagttgagtcattgggctcagtattggaacaacacgaacgctttccagagcgcgccaatattggttttatgcaggtagttgatagaaatacattgcatttacgggtatttgaacgtggtgctggagaaactcaagcttgtggaagcggtgcctgtgccgctgtcgcggtggggatttcccaaggtttattagatagaaaagtgaaagttaatttaccgggtggatcattatcaattgaatggaaaggtacaggaaacccactttatatgacaggacctgctgtgcatatttatgatggaacaatccagctataatattatttttgagaggtgcttggtatgacggataagaatgagcagttttgttaccctgagaaaaacgaactcaacgatcaaaccatcattgattatctcaaggagcatcctggtttctttatccgtaatgccagctatattgagcaaatgcaagttcctcacccagtaagagggagtatctcattagttgagtggataatgtcacgtcagcgaacacgtattcattatcttgaagaggatatgcgtttgttgattgagcaagctgcagaaaatgaatctctatttagccaattactaaggcttatttctgagttatcccgctgtaattcattaaaggaaatgctggaacagttaaatctttgggcgaaggagttagggctttactcagtacaactgcgtcttttcaccgatcgttggcaattacaacctcctttagatgctcaaacactcgcactatctcgtcaaacatttgagcatttccgtattcagcgtatgggcgataataatcactatttggggccattaaatggccaagaaatgatgttattaatgcctaatgttcgtcgttctggctctgtggcactctcattattagggcattatggcgatttaggggtgatcatttttaatagtcgagatagccaacattttcaagaaggtatgggaacggcaatgttggataaactcgcacagatattacctgagttattaactcgctggatcgcaagacaatgagccaaattattgacgtccctgaaacactctcattagccattgatagcttcttaagttatatcgaagttgaacggcgattaagtccggtaacggtagaaaattaccagcgacaattaatgaccattgcacaaatgatggttgcaataaaaatcaaccaatggtcgttactagaaagccaacatgtgcgtatgttattggctaaaagccatcgcagtggattacaacctgcaagtttagcattgcgcttttcagcattgcgtagcttccttgattggcaagtttctcaaggaatgttagcagtaaaccccgccaaaggggttcgaacacccaaatcaggtcgtcacttgcctaaaaatatggatgttgatgaagtcagtcagttgatgaatatcgacttaaaagatcccctctctgtaagggatagaacgatgctggaagtgatgtatggcgctggattacgtttatctgaactgactaacttaaatatcaatgatattgatctccaagaaggcgaagtccgagtattaggtaaaggcagtaaagagcgtaaagttcccttgggaagaaaagctgtagagtggttacagcattggtttgccatgcgggagctgtattctcctgaggatactgcggtttttatctcaacgaaaagcggtaaacgattatctgttcgcagtgtgcaaaaacgttttgaactttggggggtgaaacaaggactcagtagccatgtcaatcctcataaactgcgccactcttttgccactcatttacttgaatcaagtggtgatttgcgagcagtacaagagctattaggccacgctaatttatcaaccacacaagtttatactcacttagattttcagcatttagcgaaagtctatgatgctgctcatccaagagctaagagagaaaaatcataatgcacttttatcgcactctgatgccgattgcagcgatgacttttgatttagacgatacgctgtatgacaatgttcctgtgatggataaaacagaagaagagaccttagcgtttatccgtcagtatgatgagcgttttcaccattttactgaacatgatgtagatgcttacaaacagccactattagaaaataatcctgatatttttcacgatatcactcagtggcgttggttagcggctaaaaatatgttgttagactatggctatagtgaaactaaagcacagcaaggtgctgatgaaattatggctcattttgcttattggcgtagccgtattaatgtccctaataatacccatcacgtgttgacacaactggcggaaaaaatcccattaatcgctattactaatggtaatgctaatccattaagctgtgggttggggcaatactttacacatattttaaaggcagggcctgatgggcgctctaagccttatcctgatatgtttgataaggcggcttcgttacttaaactccctcatcagaatattttgcatgtaggcgatcatctagtgacggatgtagaaggcgcggttaaaagtggattacaggcgtgttggattaatttagataatcgcagtttgtttaccgaaggtgaaacgcgtgttatgcctcatattgagatcactgaattagctaaactggttgaattaatttaatcatagacgcgctctgtgcaggtctttatccacttttcagtgggcatagttttgcatcgggcgtaaaatcctgttagtttgttgcttaataaactaacttctgtatatatccacagtatttctcttcactcaatgattggtaattatggacgtctcatatctgctcgaaggccttaacgataaacagcgcgaagccgttgcagcaccgcgtgtaaatatgctggtacttgcaggtgctggtagtggtaaaacacgtgtattagtacatcgcattgcttggttattatctgttgaacaagcctctcctttttccattatggcggtaacatttactaataaagctgcagcagaaatgcgtcatcgtattgaggacttgattggtactagtcaagggggaatgtggataggtaccttccatagtctcgcccatcgtttattacgggcgcattatcttgatgctggtttacctcaagacttccaaatcattgatagtgatgatcaataccgtttaattcgtcgtatcgtaaaatccatggctcttgatgataagcaatggcctcctcgtcaaggtatgtggtatatcaatggaaagaaagatgagggactccgcccacaacatattcagacctatggtaaccccgtggaaaccacatggttaaaagtctatcaagcttatcaagaagcttgtgatcgtgcaggcttagtggactttgcagagttgttattgcgtgcccatgagttgtggctgaataaaccacaaattttagaacactatcaacaccgttttaccaatatcttagtggatgaattccaagatactaaccgtattcaatatgcttggatcaggatgttggcaggacagactggtaaggtgatgatagtcggtgatgatgatcaatctatttacggttggcgtggggctcaagttgaaaatattcaaaactttttaaatgaatttcccggcgctgaaaccatccgcttagagcaaaattatcgctccaccagtaatattctaaaagccgctaatgccttaattgctaataatagcgatcgtttaggtaaaaacctatggacagaaggggctgaaggcgagccgatttcactctattgtgcatttaacgacctagatgaagcgcgttatgtagtagggcgtattaagcgttggcatgaagagggaggcgcccttgcagattgtgccattctttatcgtagtaatgcccaatcgcgcatcatggaagaagcgctattacaagcgaataagccttatcgtatttatggtggacagcgtttcttcgagcgtcaagagatcaaagatgccctctcttatatgcgtttaacagcgaatcgtcacgatgatgcctcttttgaacgtgttgtgaatacgccaacgcgtggaattggtgatagaaccttagatgtggttcgccaagtagctagagataaccaaatcacattatgggaaagtgcattacaggttattgagcataaaatgctagcaggccgggctattgcggcaattgcgcgctttttagaattaattgagacgttagcaaatgaaacagcggatatgccgttgcatgtgcaaacagaccgtattattcgcgattctggcttaaaagcgatgtatgagcaggaaaagggtgaaaaagcacaagcgcggattgaaaacttggaagagctggtgacggcgactcgtcaatttagctatcaagatgaagacgaagatttaatgccattgcaagcttttctctctcatgcggcattagaatcaggagaaggacaggctgatgcgtatcaagatgctgttcaattgatgacactacactcggcgaaagggctagagttctcacaagtgtttattgtcggggttgaagaaggcatgttcccaagccagatgtccttggatgaaggtgggcgcttagaagaagagcgtcggctagcttatgttggcgtgacgcgtgccatgaaaaagttaacacttacttacgctgaaaaccgccgtttatatggtaaagaagtgagccatcgaccttcgcgctttattggcgagttaccaaaagagtgtgttgaagaagtacggttacgggcgacggtttcacgtcccgtgaatcatcatcgtttaggtacaccgattgttagtaatgatacaggttactcccttggtcaacgggttaaacaccctaaatttggtgaaggtactattattaatatcgaaggtagcggtgaacactgccgattacaaatagcctttaatggtgaaggtattaagtggttggttgctgcttttgcacgattagagtgattggctatttattgacactgttaattttttaaaagagagcaatataaaaaaacacccttactaatctagaagatagttaagggtgttttttttaatgaacatataattaaccgaattaataattccgttacagattattttaacggagttagctgatgaaaattacttctgtattatttgatacttattatccaattaagcctgtgacaaaaatcgctgaggatttctctgttgataaaatgccccctgtggagcctatttatgagcagcgttttgatacttaccatcctagtgctcctgccaacccgtttgaagaagatctctattgtcgattattacgacatcaacgtgattttgtgccgcgcatgaatctctatttaagtggggtgatcggtgctatccgtattgcaactaattctacatcaacattctttagacgctcacaacgccgtatagaagcgatagcaatgggttgtaatacaaaagaagagcactcaagccctgccagaaaggggtatctttctggcgctttcattagtattgataatttagctcaatagtaagtatgtgctaacttcgtcttaaacgttgctgagtgtagagtgcatctaaagtaaataagataagggcgacccaaataaacccaaaggtcactaaacgctccgcatcgatttgttctccatacaccatagtggcgagaataaacatcaatgtgggtcctatatactggaaaaatcctagggtagatagacgcaaatgttgagctgcttcggtaaagagcagtaagggtacggtggtgataacccctgcagcaatcagtaatgtatttagcgaccagctattttctaacatattgctggtgggtgaatgggtaaaaaagaggatataaactaaagcaacaggaaacagccacagtgtttctattgtcatacccgtttgtgcatctaccccaagttttttacgtaatagtccatataggccgaatgtgactgctaaactaaggccgataacaggtacagagccgaattgccataattggataaagacgccagtaaaggctaaacttacggcgaaccattgcatacggcgaaagcgctcgcctaaaaaaatcataccgaataacacattaactaatggattaataaagtaaccaaggctggcttctaacataaatccgtggttaaccgcccatatatagataagccagttactggcaataatcaccgcagtaagtgctaacattagtacttttttgggctgacgaacaagttggcgtaaatagggccaatggcgagtgatcgacattaaaagcaacataaagaagaatgaccataaaatacggtgtgttaagatctcttctgcgggcacttcttgaatgcttttaaaatagacaggggcaataccccagatcaaataggcgcctagggcacataaaacgccttttaaagtgtttttctggctcatgctatctctggtattgatggaaatgaaatatgtgacggggttatcatacccaatgacattatctaatgtgtcattaggcatgtttttttacaagtaattaatattaatctacccaagataatggataagtcgcatcagccaacaatataagttgctgtgccgctggcgatatgaacttgtttttcattgtgtaattcaacccttgccacagaaactttattaccactacgtagtatatgactacttgcggtaaaacattcccctcgccctgggcgtaaataatcaacacgtagatcgatagtgcccattttggccagtttttgttcgagttgctcttgggatataggggctagacgtgttagggcattacctacacagactaaacctgcacttacgtctaacaccgaggctatcatgccaccatgtaaaatgcgttgtgcgatattgccaaccagtttgtcttggtagcgaaattggatctcagcataatcttgttcgaagcgaattaattctaaacctatcagttgattaaaaggcatttgatagacaaaaacatgtccaatcaacacttgtgcttcttccagtgttaatattttctccattttaaagttcctcgacattttattattaggttaatgctttgttaataatagatgacaaaaaggtaatttcccattcatcagattaatagagcgtcgagaaaatatatgagatttaatggaaataacgtgtaaaatatggacgcctaacgcgaataaagctgatttataagcgctcacgacaaatattaagtgctatcttttatattgttcactaataatacaggataattaactatgcgttacatccgttctttactcacggtgattttaacctaccctgtatggggagtggcggcggagatatcacctgtatcatctccaacaccgttggttcagggcagtattatttccggtctattacaagagtatgattcaccctttgtactttacccttatgaatctaattatattatttacacaaaaacctccgatatgaataaagaggcgattgccagttatgattggggtcataaggctaaaaaagatgaagttaaatttcagataagtcttgcattcccgctgtggcgtggcattgccggggaaaattctgtattagcggcttcctatacgcaacgctcttggtggcagctaagtaataaaaaagagtctgcgccgtttcgcgaaaccaactatgaaccacaactatttttaggttgggcgacggattatcaatttgccggttggacattaagagaaattgaaacgggatttaaccatgaatcgaatggccgcgcagagcctacttcacgaagttggaatcgtgtttatgcacgttttatggcgcaaaaaggtaatttccaactcgatctgaaaccttggtaccgttttaatgaaagtgctaaaaatgatgataatcccgatattaatcgctatatgggatattaccgcttaaaagcgggttatcgtttaggcgaaagtacgtttactttaacagggcgttataactggagtagcggatacggtgctgctgagctaggctggagctatcctattaccaagcatgtacgcttttatacccaactatttagtgggtatggggagtcgatgattgattataatttccgtcaaactcgtatcggtgtcggcgttatgctcaatgatatgctgtaattttcttcattctagggtagcataacacgacaagtggtgatggcacctttatactggtgccttttcttttactcctcattatctttcttaccagcttttcagaggaatggcgtgtccacagcagaagttcttaattcaatgccatcagctcaggttattttgcgcgaaacctttggttatcagcaatttcgaccaggccagcaagagattattgataccattatcaccgggcgcgattgtttagtcgtcatgccgacgggagggggaaaatcactttgctatcaaattcctgctcttttgcttgatggcttaaccgtagttgtttctccgttgatttctctaatgaaagatcaagttgatcaactctgcttacatggtattgacgcggcatttcttaattcaactcaaagccgagatgaacaactgcaagtacaaatgcgttgtcaacggggtgaaataaaactgttatatattgcacctgaacgcctaatgatggagagttttcttcaccatttagtgcaatggcagcctgctttattagcggtggatgaagcacactgtatttctcaatggggtcatgattttcgccctgaataccgaggaattggcttattaagacagtatcttcctgatgtccctattattgcgttaacggcgacggctgataatacaacacgtcatgacattattaatcagctcgcgttacgcactcctttagttcatattagcagttttgaccgcccaaatattcgttatactttagttgaaaaatataaaccgctcgatcaactttggctgtttattcgtgggcagaaaggaaaatcaggcattatctattgtaatagtcgcagcaaagtagaagagaccgctgaacgactaggcaagcgaggattaagtatcgcggcttatcatgcgggtatggatattgccacacgagcgaaagtgcaagatgcttttcaacgcgatgatttgcagattgtggtcgcaacggtcgctttcggtatgggaattaataaacccaatgtacgttttgtggttcattttgatattccgcgtaatattgaatcttactatcaagaaacgggacgcgcaggacgcgatggtttacctgcacaagcggtactgttttatgatcccgcggatatggcttggctacgtcgttgtttagatgagaagccagaaagtgaacaaaaagcgattgaatcccataaattaaatgccatgggggcttttgccgaagcacaaacttgtcgacgtttagtgttacttaattactttggtgaacaccgccaacaagcttgtggtaactgcgatatttgccttgatccacctaaacaatatgatgggttagtggatgcacaaaaagcgttatcttgcatctatcgtaccggacaacgttttggtattggttatattgttgaaattttacgcggtgccaataatcaacgcattcgcgataatggtcatgacaaattgccagtttatggtattggtaaagcccatagccatgaatattggatgagtgtgatccgccaattgatccatttaggtatggttgcgcaaaatatcgttcatcgttctgcattacaattgactgagatagctcgaccgatattgcgtggtgaggtgtcattacccttggcagtaccacgactattaagcccaacaaaaagccgttatcagcaaacaaaaaatagtcatcgacagtacgataggaaattatttgcgaaactacgcaaattacgtaaatctattgctgatgaagaaaatattccaccctttgtggtatttaatgatgtcacactgattgaaatggcggaacaatgccctgtctgccctgatgaattgttgttgatcaatggggtaggacaacgaaaactagaacgatttgggccagcatttatgacacttatccgtgatcatattgaggggttcgaatagcgccaacgaggaggagccgaatgacaaccacactttttcagcacatgtggttatctcgtgaaaagcaattctctgcttttacgaatggtatcttattggacttttggaaccaacgacaggaaggcgaatttaccggagtcgatggcgtgagcattcgctatgctcattggcgctcttcatcacacaaaaaagcgttggtgatctgctctggtcgtagtgaaagttatgtaaaatatcctgaagtggccttcgatttttatcatcttggttatgatatttttcttctcgatcatcgggggcaaggattatcagggcgcttattagatgatccgcaaaaaggccacgtagaaaaattcagtgattatgtcgatgatttatcgacatttattgatactatcgttttgccttatcactatcagcactattttgcgttagcccattcgatgggcggcgctattttagccagctacctattacgtaaacctgatattttccaagccgccgcactgtgtgcgccgatgtttgggattaatttaccaataccacgctgggtggctaattttttagttaaccgtgcagaacaaagtgtttcagaacgaaataattacgcggtatcaacgggcaaatggtttcctttgccatttatcttgaatgtattgactcatagccatgaaaggtatcgtcgatacttacgttactatgccgatttccctcaattacgtttaggtgggccgacctatcattggatgaaagagagcctagaaacgggggattggctgattgaacatgcaaaagagattaacacccctttgctagtacttgaagctgagctagataaagtggtggataatcggggagtaagggctttctgtgatggttatagtcagtccagaacaagagaagaaaagcaaaaattgccacttgtgattgaaggtgcgcaccatgaaatcttgttcgaaatagataagctacgctcacaagcattaattgaaatctgtgagttttatgataagcatttattttaatcaggaatgtgtatgtattcgatagttgcttctgatcttgatggcaccttgttatcacctaaccacttattaactccctataccaaagaaacgttacatctgcttattgaaaaagggatccattttgtgtttgccacaggacgtcatcatatcgatgtggcacaaattcgtgatgggcttggtattgacgcgtatatgatcacttcaaatggggctcgagtacacaatacgcaaggcactcttattttcagtcaagatcttgaacctgaaatcgtttatgacttagccctaatggtgtttgatcacccagatattgcaacgaatatttatagcagtgatgactggtatatcaataaagaaacgcctgaattaaaagaattttttaaagaatcggtatttaattaccgtctatttgagaaaacaggcttcccaacaacgcaggtgtgcaaagtcttttttacctcagaagatcatgaattgttagttgagttagaaaagaaaattaatcaacgttggggcaataaaattaacgcaagtttttcgttgcgtaattgcctagaaattatggcgggtggggtatcaaaaggagaggcactacaaaaagtcgctaagttgatgcaacattcagtaaaagatgccattgcatttggtgatggtatgaatgataaagagatgctacagatggcgggtaaaggctgcattatgcaaaatgcccaccagctactaaaagatctattaccggatatggaagtgattggctcaaatgttgatgatgctgttgcacactatttacgtaagttgtatcaggtttaatcacaaccaatgggataaattaaaaggcggataatacttccgccttttagtttaagagcgcaatttacttaatgatattgcagggtaaattgcagtgttccatcagctttgcctgcggtggtagtctcagaagtttgtatataacccgcttctaaaggaatagaaaaattaccactgttattcttttcgctcaccgttatcaattttcctaactcaatgggttggttttggtatttcacctgaatgccatagcctttggctgtattgctatcattagcattattaaggctaatcgtgccggcggtttggctagcatcaggggtgccatcgaattttatcttaatgggggaaacgggatcacaatctaaatcgatattcacatcttgtagactatcagggctaacagagccaacaccattaaagctcgattttgccacagagcctaaaggaacattaatattattattgataacttcacagccactggaaacaatattaaggggattaaggtaaacctttggttcagtacggccagtattgtcactggtgataaatcccccattgtgatacaaaatcagcatagcaacccatgtgcttggaatggtttgtgatttgatattgttacgcagtttatataacgtcatttttaaagaagcggtataactactacggtttaagttacttgtgcaaataaggcgattactgtagttgccatcaacattatatagtccatcgacataagcagaaccggtgcaaccgacagtaatagtcccgtgtagggtataaccgataccactagtccctaattcacgcacataggcactgcctactttagggctggaagctgaaatatagccgggcaagtagatccccgcctgtactgggcctgtgatattccaccaagtccagccatacatagtgcctaagtcaatcgttgccagctctgttaaaataggcgcggttcttgaaacataaattggattgttataactcaccgttctagtggttgtatcggcacgatattcagcaaaagcggttgatgtatacaaaagtgcagacagacaacccaaagttatatatttattcatatttatcacctatctgcagtccagttgtaaaaattgaattttctcgagcgatagatcggcgtttaatgttgcttggcactgttcggtagcactattcccccatttggcttgtagttgactacttgcaggtacaccatttaggaaaacctcaccatcattagccacaatcccactggaaatcacttgtccatcttggctaatttcaacttggctaccgaatggtaaaggtttaccgttataagagaggttcactaatactcttgcacccttgcgagctttaaaatcggctaaaacaatcgcgcctttcgttgggatcactgttgttgaagtgagttccacatcgttgtttccctttaaggaagcgggatcaaccgttactctattgcgttcataacgggaaacgttagggataacggcataaccttgagcattggtatataaactttgtgcactgctaattttcaaatgatcaatatcttccgctttgattaaaatagcggagtcatagatagtgcgagatggggttattccatcttgatggattaataacgcgccagttgctccccaattcactgactggaaacgtttatcatagttataaccagcactgatttcgccgcccgaagcactataactaccattgatagcaccgctatattcttggcgagtatggttatagttttgcgaaatatcatactgaagattgttatcttcgagacgagtaccacttaaacttacagaacttatcgaatcaccttgtttactggtgttataacgataacttaaccaattgttattgctggtcatattgaacggcaggttaaagttaatcgataaaatttgatcggttaattcgctttcttgccgtttattataggcataagaaatactataactgagtgagcgataattagagttaaagcttaggttgatattgcgatcgactctatcttgataccaatagtattgctgataaccatttaaagagaggtaaccaagctctcctaatgcttgcgatactgagatctgaaactgttttttcttacgataaagctgtgaaaaacgttcattcgtggttgaaaaatcataataatctttagttgagtagcgataagacgctaatgaaaatcctgttttggtatccggtaaatattttgaatactggacacgataagattgcccttgtgctttatggttatcgataagtgtggtatttgcatgagttatatcggctgaaatcgcccctaaataacccatatttacgccggcacctatcgcataagcttgataatctgctgaaagcagcgtacctccataaagggaaaaattataaggtaagccgtaaatggcagaagcttgtaaaaaggtcggttttcgctctgcgctatcagcattatatttccccaagtcgagactatattttaagttcccagctcgttgcatcatggggactgcagagaagggttgggaaaatgtacgtttgcttccatcagcttcttcaacagttacttgtaaatcaccactataagaggtggggtagagatctgatatttcaaattcaccggggggaacagaggtttgataaataacactattattttggcgaatagtcaccattgcgttgctttgtgcaattcctcttacaacaggagcaaagccacgctgactttgtggcaacatgctttcatctgaggctaatttaataccacgataaggaacactttctaacacatcattacttgatgcggtttcacctagtgttaatcgactttttaaacggcggatatcgcgttcaacgtaagtttgtagactgttccattctgcggcgttatcactatttttgttgtaagtgctgtgattacgtacacgccaagcgcctagattaataccactgcgtaatcctaaaaagatattgtcactgtctttttggtctcgataccaatatttattctgacgataggtgtaattaataaaggctgcattaatcccatcattccattctgtgggggatatataaccttgcccatagttatataatgcaatttgtgggatcgaaaatgataatcgcgcacgtgaaaaatcatatttatatgtagcattaggaataacacgagcaatatccgttattttactactatcaggttgttggctaaacgcgtctgtaacggaccctttgactccccaattgagtaaatcctgtttactgatttcaggtgccagcacttttttatcgtcatcaaaaataaaacgaatttgacgattatcgataagtttatcgttaagataaatatcgacagaatagacaccaggaagttgtcctcctgcataggacaggtaattcagactgttaatatctgcaacgtgattttcgatacctaaattaagtgcttcaggattaaaaatatcttcagcaagaacagtataagggaataaaacagtcgtgatagcaatagctaacactccacgacgataaagattatctgccatgttgatgggtaatcgttttgtagatactgctatcatagaaaaagtcatcgccgtatactcttaatttaatactttatctacagtcgcaccgtaatcattgataaattgaacggtaactttctgcggaatatgattttcttttagcaagaccacttcttggtgaggattaacaaaatcattaaatgggtagcgtttatcacccactaagatatgtttaattgtcaggtgatacggcgtatcgttatttattactaaccctttattttgtttagataatttcaccttatcaaaatcaagtggttcaatatcatgggcacggagaaacaatttaaattgagagttaatcactaattggagttgattctctggacttttttccatcggtggaatggatttgatattgagccaataaaccacttcttggtttgatgccaaaggtgctccggtatatgaaattcgcgccgtgcctgaactatctggctcaatacgaaatagtggaggtgttgcaataaaaggtgttttttcatcaccttgataagctgaaacccaactttgaattaaatagggtttttccttatctgtattcataattggaatactgatttcacgtagattatcgtcatagacaaaacgtgttcctcccacacttattccagcagcttggctagccgttatgagggaaaatagtaaaaataatattagggaaatattctttttcataagtggccataagtttgaggagaggtgagagggtaatggtgattaccctcatatttatcatttattatttatattggatgctatatacagcagagccattggcagggcctggtgttgccgcatcagttgctttataacgagcaacgtagtctaggttaatttccgtacctgtgatctgtacatcttgtgaatcgtcatacagtttgatttgggaaacagcatctttctcaaataacgcgatacctacgttagttgcgccaccagaaacttgatctatagctaagatatctctgtcgcttgcatcacgagtaccgccaaaacgtacggctaccgtggtatcaacagggcagtcgattaatttaatggtaaaatctttcaggccagcaacttcccctttggttgctaagcttttagaagaaactttgcctaagtcgacggttaagtttttagaagagccatcaacagtacatgcttgatcggttatttctcccgtaaagttaattgtgcctgatgctaaagcagcaggtgctgagaatatagaaagagtcactcctaatgcacagagtgatttatttaatttgctcatgatcggtcctatataaaaagtaagcgaacttactttttaatctatttataagtatatatgtgtataaatttatttgcatagacagtatgccgataaaatataacattgctaattttttaagttaataaacatttacatgagtttttttgttcttacatcaaattatttaatatgtcgtaatttaattaaaatgattttttattaaaagtttttagatatttgttgaatagctaattgttgataataaactttgcaagttttcattaataaatgaatttttattcaaatataaatagaatttatattccttctcttttttatgcgttattaattgttttattgtttttttattcaattcatcttgaataaaaataagggggagacgtgcataacctaaaccatgctgaattaagctaattgctgtctctaccgagccaacttgaatgacttgggcctgattatcagtatcgggtgaatcaggagaaagagaaatacagctatgtttttgtaattcctgcaataattcctcatcttgtagtttctgtaatgggctatctggatgtgatactaaggtagttgtaatgctttctaaaacaataggttgcagtgatttaatataataaggtgacacaattaaatcatattctttttgcactaaaatttctgatttgctgagagaattcctataaatattaatatcatactgtttattctgcttaataaattgtgatattttgttcaaaaaaggatcagcgacatacattgggtcaattagtacgttaatttttaacttattgttaaatttgatattttttgcctttttttctagagataatgccttttctgtcacttctcgagaaagtgttagcaatagttctccctcagtagttaatactgcgcgtcttttttctaaagaaagtatttctatacccaaggtttgttctaacttattgatagtatagctaattgatgattgagtcctatgtaacacatcagcggcttgagcaaagccaccgtaatcaacaacagcttgtaaggtgatccattggtctaatgttgtgcgggatttttccataatggagtccttcttattattgtttattaataatgcattttaaacgaagctagcaatatatcttagcattgttaataggtaataatacgcattttttttgtgagttaaaaaaatattaacattataagttgtaatgctactttttaattagagaagaatatttatagttattttttattgttatctttgaatataacacttaaatttttatttttttatatgtaatttttataactattgtttttattttcattaatagtccacttaagttttagtatttttttaatataaattgttaattgatgatttatatttcttatttgtgttttttatttttcttttttcattttgttttttttattttgtttttattaaatataaatattaattaatttcttaattacttattttttaataaatatgtttatctattatatttaaaaataaagataaaaaagaaattggccaagttagtgttcacctcgtgtgaagagaaaacaaacctgcgtatataataaattaatacacttatcttttttagactacttgttggtgtttcatatagcaatttgaatgatttttgctacgtcacgctgatgcagcaaggaaaaggagaggataatgataggttaaaaaataaactaaaattatttgacttaagttaaacaaaaattaaatatgataaaaataagtaaaataaaatatcgaaaatagtattttaatactcatttattgagtaaatttaagtataaaaacgtatttttgtgatctttagcaataaaaaaagataggcgtgtttgcacaaatttttgaagaatacagaacaaagatggctttttatattgcaaaaattgataaacattaaaataagagaaaacagtaagcaactaagatggtcgctattatttcttaattctttacttagtaagaaggatctttggtaataaaagagatctctataagtaaatagaaaactaagtaacattttatgatgttcatattccaatattgtataattatatatcgataaaatagtttcattgtgttattaatcatcaattttattaaacaaaaaagtgaaaaaaaaagttattaatagtgataggtaaacggagtgtgcatacctattgtggtgtgacatgcgtcataccaacagaatagctgtttataactggctgtttgtattgaatgctaggcgcataacagtggtaagaagagtggtaacaagaagcaaaaatgccactattttggttttttcatttaaattagtggcatttttattcaaagtaatagatgtaattgactacaatccgcctacttctcttggtgttgcacgcattgaagtactaatggtattacccaccatatctacccgtgcttggaacggcgggaatggtaatggaatgccatgctctgcaaaggctagcagaatattttgatggatctcatgtctggctggcattctatgtcccatttctgcggcataaacacgtaactcgaagatttggatcccttgttgtaggtcaaccaagtaaacctcaggagcggggttgtctaaaatcatggtagagcgtttagaggcttctaataaaacattggtcacttgttcactattgcaatcagctggcgcagggatggtcattacgatacgtgtaatagagtctgataatgaccagttaataaattgctctgtaataaatgctttattaggcacaatgatctcttttctatcccaatcggtgagcgtggtggctcgcgtattgattttagaaatattcccagtcaagttacggatagtaacggtatcaccaatacgaattggcttttcaaacaagatcattaaccctgagataatgttggcaaaaatttcttgtaagccaaaaccaagacctacacccatagcggcaattaaccattgtagttttgaccactcaatacctaataatgagaaaccaacaatactgcctattagggtgatgctgtatttcgttaaagtggtaatggcataacctgtaccaggtgttagatctaagtgttgtaaaattgccagttcaagcagtgctggcagatttcttaccaattgtgccgtgataataatcactaatatagcgactaagatagaccccatggtaatgggctggatagtattgacgccattaacagaggaagtcacatcccatagtcggatattatcgacaaaagagaaggctgtattgagctctgaccagagtaaaatcatggacacaagtgcaatcatggtcagaatagaacgtactagaccaatagattgtgcactaatcgcatcaaggtcaatggcttgatcttccaactctaagttagcggtactctcaccactgctgccaacaatggtattctcatcttcccctttagctcgttgagctaaaatttctgcccgtttttgtttggctcgttcaaaggcaagcttacgacgttggatcagcatccatcgttgaataatatgataaataatcagcaaggcaaaccaaatcgccacagacatctctaagcgacccagtaatacgatggaggttgagagatagcctaagatagcggcgagggctgcaagaacaggggcaacaagtaagaaccaccataaaatggtatttatcacattatcaccagagccatgtttatctaagtaaagcggcacatgtgccttttttaggcttgaggtaataaaacttaaagcaatgcacaataataaaaagcaaaaacgcccaaccgttggcgcaaattctctgtcactatagtattcaaaggtgataagcgacatcattaacggcacaatgacgaaaatcgacagttgataaaagcgcatcgcttttttcacacgactctctttccatttaaattgcgcgataaataatccattagggcgagcaaaggtagcacttatcataaatagccatagcacaggggctgcggcagtcacaccataaccaatcgctcccgccatgggataacgccattcgacactttgtaaaccatatcctacggcagaccataatagcggtagtggtaaggcgattaatattgaccaaaatacggtacgcaccgttaatgagaaatgatcttgagtgactttaccaatgcgattactgactctttcaagaaacgcattgtaatgcttacgggtacgaagactaaaaccgacaatagatagggtgaccagtagatagataaaggtatcttggtttttgagcatgttaaccgcagcatgccctaattgtgagaaagtatctaatgaaagtaggcgagtaatatctttaattaataaaaccggataattgagttttattgggctgatatcggccacccagaacatatagcggtttgtggcatcttttgtctcttttaaggcatccgcaagttgtgttgtggctactttaagcttggtcagctctaagatttgggagtcataaccggataaaagagaattgagtaactcttggcgcgcttgaatgagggagtcaaaaatatattgctgcgcttctggtagctttgagccatcggcagtttcaggaggctggattttgcctaggttttctagcatctcttcatagcctaatcgctcaacacgtaactgaacgatatctctatccagctcttgagagcggggcatttcaggtaagcgagccaattgtgttcttaatgcttcacctaatgccgtagagccacttaaccattgggcttgctctcgaatggttgtgagtgtctgtcttacttgttgggtttgttgtgttgttagacgctgtttttcggttaactcactcatttcttgcgtctgtttattgaggatctgagaaagttgacggttagtctcgatttgcttagtcagaaactcggggagttcgcccccttgctcggcgagcatttctgtcttttctaaagcgagatctgccacttcttggcgcttgatatttagtaaactacgcaattgttgcagttgtacatcaagtcgttgataacgttttttaaatagctctaagcgcagtcgagtaatttcttgacgattattagcagaaagttgcgccatttccagctcattaaccatcgcttttcgtgctgtgacttcagcttgggttaatttattttgtgcttctgctagtggggtgtttgatgcccctattgccgctaaacgtgccgttgcatcacttagtaaacgacgagcttctgaaagttgctgagggagtaaattgagtgattcgctgatttcacggcttttatcttgctcttgttgttgtagccgagcttgttccatcagttggctactcacttgaatgattttttgctcaagctcaggaatagtaattttttctggaattgttggaactgagtgactctcttcgagtaatttagcccttaactcttgagtgatctgcggatattcatcaatagtcttttgataattatccgcattaacttgagctttttcaccatcatttatccaattgatggtgccttgtagcgcctgaacagtttcaatatcttgaggattagtactgccttcaagttgtttgatatcttgacgtaatttatcaacatccgcagcaaacaccgaagtattgaatgagatagtcagaaaaaagctaaaaagtagactgattatcaggcgcacaaggtttactccgaattacgaattattcattaatggtattattatcgcaggccttatgatcagtgcctgtggcattaatgatagagcctagtagttctcccattaatgttacagagccgttcatcagatctttatttaattgaacactattttcagggaagaggttaataacggtcgagcctaatttaaagcgtcccatctcttcaccttttttcagaaatatagcgccaactttatccgcttgaggataagtccaacgtttaataataccttcacgtggtggtgttaccatgccacaccagaccgtttcaatactccctacaatggtcgctccaacaagaatttgtatcatgggaccaaattgggtgtcaaaaaggcaaataatacgttcattacgagcaaataagttaggaacatttgccgcagttaaaggattaacagaaaagagatcgccggggacataaatcatctcttttaataacccatcgcaaggcatatgaacacggtggtaatcccgtggtgaaagataggttgtaataaattgcccatggcggaactggtcggccaaggtaaaattacctgctagcaacgcttcaagggtgtaagagtgccctttggcttgtaaaatttgatcgtcttggatctgaccaagctggctgacagcgccatctgcggggagagccagttggttatctccttcaacaatagggcgagcgccatcttttaatgcacgaataaaaaactcattaaatgttgcataagcctgaaattggctctctttcgcttcattcatatcaactttatatgcgcgagcaaacattttgatagcaaattgagtaacgctacctgcttttttattggcaaaccaaccagctagctgtgttagccataatttaggcaatagatactgtagtttaatttttagcttgtccaaaatggcaacctctgggatcgaacgataaaaaatcgacaaaaggggtctattgtacccacccttaatagggttgtcagtgaatctatgcttaagagtctaaattaatatttttacgcactttcacctgactcatactttctaaaatacgatgatagttttcaaatcgggttggtgcgatttcacctttatctacggcttcggtgatcaagcaacccggatcgtcattatgcttacaatcacggaatttacagcctcctaagaaaggtcgaaactcaataaaacctttggtcacttgctcaggtgttaaatgccacaaaccaaattcacgtacccccggtgaatcaataacatcgcctcctagagggaaatggtaaaggcgcgatgcggtggtggtatgttgtccaagccctgagttgtcagagacttgattgaccagaatactttcttccattggtggtaagagagtattgagaaggctcgatttacccacacctgactggccagcaaaaatagagatgcggccaattaatgcttgagttaatgcttctaatccctctttggtatagcttgagacttcaagcactcgataaccaatatctttataaatttgcatccactcacttaccatcgctcggctttctgcatctaacatatcgactttattcaatacaataaggggttcgatatttaaggtttcacaagccactaagtagcggtcgataatattaagtgaaagctcaggtaaaatggctgaaacaataataatttgatcgatattagcggcaataggtttaataccatcataataatctgggcgagtgagtacagaagtacgctcatgaacagcttctacaatgccattgacgcgcacattttcttgggtttgtaatgcagggcgccacaccactctatcgcctgtgactagggatgaaatagtacggcgaatattacaacgagtaatcgagccatctgcagcttcaatatctgcatgttgcccaaagcgactgataacgaggccttcggtcgcttcgcctaattgtgtatcgtctaattcaacgtgattttttttctctttgctttgcaaacgctttttatgattttcttgtactcggcgttgctggcctttagataatttacgttttgtcaccgatcctcacttgtgttattcggttagatgttcttttgtcgtgcttattgagtaaacgcgctatgataaaggttaaaatatcatgtctcactctaagaaacagctaggatatattatgtcaaaaagcgagaacaatcttatctggatagatctggaaatgactggccttgatcctgaacgcgatcgtattattgaaattgccactatcgtcaccgatccccaacttaatattttagctgaaggtcccgttattgccgtacatcaatcggataaattactcgcctcgatggatgaatggaatactacaacacatacggcaagtggtttagttcagcgggttaaagagagtcagtatgatgatgcggctgcacaacaagccactatcgaattccttgaaaaatgggtgccacagggtgcatcaccgatctgtggtaatagtgtggggcaagatagacgttttctatttcgctatatgcctgaattagaaaaatattttcattatcgttatctcgatgtcagtacactaaaagagttagctcgtcgctggaaacctgaaatccttgaaggatttaagaaaaaaaatactcatcaagcgttggatgatattcgagaatctattgctgaattagcctattatcgccaaacctttattaaagagtagaaattagcggattgatggctgatattgcatcattgtgacgattttatcgtcatgcaatcaaaaaaacgcatttttttactgataagggcttgcggttaagcatttttctcgtataatgcgcttcccgtaccgatgaagaatttcgtttgtacgggtgtaagaaagacgcgggaatagctcagttggtagagcacaaccttgccaaggttggggtcgcgagttcgagtctcgtttcccgctccaatctttcttcgatagttatcagtattagcgacgcgggaatagctcagttggtagagcacaaccttgccaaggttggggtcgcgagttcgagtctcgtttcccgctccaaatctttcttcgataattatcagcacaaaacttaccaaatgcgggaatagctcagttggtagagcacaaccttgccaaggttggggtcgcgagttcgagtctcgtttcccgctccaaatcttcttccaaagacttcaataaactcagtaaattcttataaatcaaagcgtttgtcgtaatagcattagctaagttgtttttagaagtcggcctgtctctctatgataagaatatacagtaagatatttttaccctaaaagtcgccgagtaagcagggcttgcatgtctcgtctgccatccgcaataataaagataaccacttgttttgctattgtgtgatagatgacacgataaggtttaaaaaagatttgctgatattcacgaatacctaaactttgtaattcctttggaatactgcctttcataggaaagttagcctgtgtattagtgaccttaagcagctcatctaatacataatctgcattatctatgctgtcgtggtcggcaatatagttattgatgtcctctaagtctgtttcggcatctttcgtcattaccactttataggacgccattacgattatttccttttactttttaaacgctgaaccacgctttttatatcttttacttcacctgcttcaacttgttgctgacctaacgccaatattttaagtaaggctaatgtttcctgtgtctcttcataaaaggtaatatcctgaataaccgcttttgcttcgccattttgagtaataatcatcggtgcaccagattcagtgagtttagtcatcacttcggcgacattagcttttaaataactaattggtttgatttgttctgagtaacgcatatctaccttaatcaataagactaaattaagtctaaaaaaagtctaatctgagtgtgaagagataaaagctaaaatgcaatatagaaaacctttagcgaaaaccgcttaatgaacagtccaactctatgaggtcacttcaacagggcggggagcagtcacgcataagcaacaatacaaagcgttattttgtttaataacacccaaataaagctattgcattctaaaagtcacaaggacataactatggacaggaaatagcaatgcttgtataaaatataaccaaaaaatctttattttctctctcactttttaaaaatgagtctacactgtggtaggtgcagatcagcgattgtagctaatacacttaaagcgagtgacccattgcagtgcagaaaaagggaaatcgataacagcaagaaagatcaagctatttttttgtgatctatctttgatctttgcttgcatttctatttagccagcactagaatgtgcgcctttcctcgtttaggggggagctaaacctcagatcaatttttgttgtttaggtttttattctgttaaatatactttgaagagtattttttatgaagaaaagtatttttatgacttttctttggaaaaaagagcccgagttccacttatcttaatattcttatcgaaataaattatccacaataagatgctcataatccttgcatctagcactaatttatttttttactgcacagagttatccacaggctgctatcattgagtcattagcatattatgctagtgagttaaatattgcttttatctatccaattgataagtaagtttatttttattttttttaatttgtgccacacttcgcttgaattttttcttcatattgatagacaaagagtttttattttattcacaggtgaaattatctcatcttatgagtatgcgtatcatgttaaaaactaagcatcacgaggtaggcccttagttattgcccttactagacgtttttgttgtgaagtctgtatttttagtgttttttcttctcttttggctttctgttgggcgatagcccagtgcaaatgttcatctaaaacctcccctaaaccaaagtgctcttgcaaggccagtacaattttgtcctgataaggggcattgcctaacgcaacactaatatttcttagccaacgtaaatagccaattcgtcggatcggtgaaccttctgtaatacgcagaaatttttcttcactccattggaatagatccagcaattctggtgtatgtaaggcacggcgcggagaaaaatcatcttcctctgtgagcgaagaaaaacgattccatgggcaaattaattggcaatcatcacaaccatagatacgattgcccatcaaagggcgaaattcttcaggaatagcgccttcaagttcaatcgttaggtaagaaatacagcgacgagcatcaatggtgtaaggctctacgatggcgcctgttgggcaagtggtcatgcaagctacacatttaccgcattgctcttcaacgggagaatcaataggcaaaggtaaattaattaataattcaccgagaaaaaaccaagagccggcctgattattgataacaagtgagtgtttaccaacccacccaagaccagctttcacggccaatggtcgttccattatcggcgctgaatcaacaaaaggacgaaaattaacaataccttgatattcaaactgttggcaatattgcgtaattttttcacctaattttttaaggcgttgtcttaatactttgtgataatctctacccaatgcataacggctaatatagccttgctctggattattaagggtacgagcaaaagcagcatctgttggcaaatagttcattctgacgctgatcactcgcaatgtacccggcaccaattcatggggtcttgctcgagtcatgccatatttagccatccatgccatttcaccatgatactgtttatctagccaagcttgtaaacgaggctcttcgagcgataaatcagtatcgcaaattcctgtttgttggaatcctagttcagttccccaacgttttatattttgagcaaggtgatgaagatcgagtgatgacatgagcaaccgaaataatagctaataggtgagtcctaagaatgcgcagtgtatcatagtgcaacgataggaaaaatcctcgtaagaaatagatttatggtatggttatttgaaattgattctgataataatttactttaagtgaatataaaaatggtctgtttgcatgtgctctaacatgctattaactaagtcgttattacctaacaatagattgtatgaatatgaaagaatgggttgttacattagaagatgaagctgcaacagtaaaactagggcattcagtcgcaatggcgacaaataaccaagggcttattatttatttatttggtgatctaggggccgggaaaaccacctttagccgcggatttttacaagctttaggtcatcaaggtcatgttaaaagtccgacatataccttggtagagccttatatgctgacaccacgcccagtctatcatttcgatctttatcgcttagcttcagcggaagagttagaatttatggggatacgtgactattttgcacaagatccactgtgtctcattgaatggccttctcaaggggaagggtttatacctaatgcggatttagagcttcatttaagctatgaaaatgaaggtcgtaaagcccattttattgccctttcacagagagggaatgctgttttatcccgtattcagtctgcataaaggaatattgattatgtcgagtctcatcactattgtgagccaatgtcagcgttatattgccacctttttgttggttgttctgtcactttttgtggtgcaaatagcacaagccgctacggtaacagaagtgaaggccgaaaatggggatgtggctacaacacttacattttcgtttagtggtgggaaaccaagctatagatattactcactgaaaaatccagataggttagtgatggattttaagcaaggtagccaaataacgggtttacctgtgacattaaatcgtcagcaattagcacagaaaattcgcacgacacaatcaaaagatagccaatatcaaagtatggtggtagagcttgccaaaccagtggtggtgacggagcgcttattaaatagcaatggtgaatataagttagtacttactatcaaacctattaatgctcgacaaaataacaatacatcaacgacggtcagtgtagtggcgttatcagcaaacaaagccacaaatacggtggctaatcaacagatggcgcctttggtgagtacgcctaagcaacctgttgcacctgtagtaccagtaaagcctcgcacaacctcgaataagcccgcgtcgagcgatcggcaaataattattgcgattgacgcagggcatggggggcaagatcccggcgctattgggcaaaaaggtaatcgtgaaaaagatgttaccttaagagtggcaaaaaaattagaagcgattttgcgtaatgatcctatgttcaaacccgttttaacccgcaatggcgactattttatttctgttgctggacgctctgaagtggcccgtaagcaaggtgccaatatgttagtgtctattcatgccgactctgcacctaatcgtagtgcgcgcggggcatctgtttgggtattgtcaaatcgtcgcgcgaatagtgaattaggtaaatggcttgaacaaagcgaaaaacaatcagagcttctcggtggcgctggtgatgcactcgcagaaggggttgatccctatttaagccaagcagtattagatttacaatttggtaattcacagcgtgtaggctatgacgttgcggtagcggtgttatctgaacttagaaaagtaggatcattacataaaaaaacaccagagcacgccagcttaggggttttacgttcacctgatattccgtctattttagtcgaaacaggttttattagtcatgccgctgaggaacaattgctgatttcagatgcttaccaagagaaattagccgcttcaatctatgccggattaaaaaattactttctcgctcatcccttacagaatgggccaaaataaagataaacgtgggataaggtaatggcgattaatttattacctcctcagttagcaaatcagattgcagcaggggaagtcgttgaaagacccgcttctgttgttaaagagttacttgaaaacagcttagatgcgggtgcgacaacaattgatatcgatatcgataaaggtggcgctaagctaattcgtatccgcgataatggatgcggcatttctcgtgatgatttgaagttagcacttgctcgccatgcaacaagcaaaatatcgacactggatgatcttgaagccattatgagcatggggtttcgtggtgaagccttagccagtatcagctctgtatcacgtttaaccttaacatctcgtaccgcatctcaggaggaggcttggcaagcctacgccgaagggcgtgatatgacagtggcagtcaagccagcagcacatccggtggggagcacagttgaagtgctcgatcttttttataacactcctgcaagacgtaaatttttacgtaccgaaaaaacagagtttggtcatatagatgaagtagtacgtcgtatagccttatcccgctttgatgtgtcaattaatttaacccacaacggtaagcgggtgcgtcaatatcgcgctgcgaaagaaactcatcagcatcatcgtcgtttaagtgctatctgtggtaatcattttgttgatcaagcaatgcaactaacgtgggagcatggtgatctggcaataaaaggctgggtagagcatcctttagctccagtgcaaggcagtgaaatacagtactgttatgtcaatgggcgcatgatgcgcgatagattgattaaccatgctattcgtcaagcatatgaaggttatttgcaaggtgagcagcaaccttcttatgtgctttatttaaccgttgaccctcatcaagtggatgtcaatgtgcatcctgccaaacatgaagtgcgttttcacgaatcgcgcttagtacacgattttatctatcaagctgtcttgagtgtgttaaggcaggttacagaagatacgttatctttagatgaagaggataatggggctttaactgccacaacatttcctgaaaatcgccaagttgcgggagaaaatgttttttcgcagccttatcaagcaccagtaacctcatctacgcaaaaaaagagcacgggagcttaccaaggaagtgcaggaaaagggttaacagatacgcaaaagagtccccaaaaaacgctagatacacgtcagtttggtgagagttatcaacgtacgcaaggcatgctttatcaaaaaatgatgcaagaaagtgcgagcgatgttgaaaataaagaaaaaatacccctatttccccctcgtcccccattgaatttggttgatgttggtcatacaacgaataacaatgaaacaaatgtaatttcagtggtgcctcgttctgttaatgccagcgcagcgcaaacagattatacttttggccgggtattggcgatttatcagcagaaatatgcgttaattgaatcttcgcaaggtctagggctgttagcattggaagaagctgattttctgttaaaatgtgcccagttattgccagaaaatgaaaatctgaaaccccaacctttgctagtgcctttaaaagtcacactcagtaaagatgaaattaatacatttaagcagtttcaggcgttaatcagtgattttgggattgttatcgacatctctcatggtaaagcgacgatccacgcggtctcgttgcctttgcgacagcaaaatttacctgaattactgacaaagctattagcttatttggcaacagaaaaattatgctctaaacaacaaattgggcattggttagcaaaacagttaagtcatgagtcgggtgtttggtcacaggctcaggcagtaggattattggctgatattgaacgattatgtccacaatatgtcagacagccgtccaaaaacttattacaattaatagaattacaacctgtggtagcggcactgaataatgagcgaagtaaaaacgcaaataaaacctaaagcaatctttctgatggggccaacagcctctggtaaaaccgcattagccattgcgctaagacaaaaactgcccgttgatcttattagtgttgattctgctcttatttatcgtggtatggatattggtactgcgaaaccggatgagacagagcagtcgcttgcaccacatcgtttaattgatattctagatcccgcattaccttattctgccgcagactttcgtaaagatgcgttaaaagcaatggaagaaattacggctgcaggacgaattccactattagtgggcgggactatgctatattttaaagcgttattagaaggcttatcgcctttacccagtgctaatccagaaattcgtgctgaaatcgaaaaaaaagcagccgaacaagggtgggaggcaattcatcaagagctagcatccgtcgatcccgttgcggctaaacggatccatcctaatgatcctcaacgcctttctcgtgcactggaagtttacctgatttcaggtaaatcgatgacagaattaactcaaatatcaggcgaagcattgccttatgatgtttatcagtttgcgattgctccgaaagatagaaatgtacttcatcaacgcattgaagcacgttttaaacagatgttaacgtgtggctttgaagatgaagtaaaatcattataccaacggggcgatctgcatgaagatttaccttctatacgttgtgtcggctatcgccagatgtggtcatatttatccggcgaaatcgactatgatgagatggtttatcgagggatctgcgctacccggcaattagcgaagcgacaaatcacttggttaagaggttggcatgatgttcattggttagatagtgaagattttgaacagtctcttaacactgttttgcaggtagttagtgcatagatggtaggtttgtgtaaaattgatagttgctaaagtgcaatttttgagtagttcattttttcgaaccattaggttctagtataaaacaacaaaataaggaaaacatagaatggctaaggggcaatctttgcaagatccttttctgaacgcattacgtcgtgaaagggtccctgtttcaatctatttggtaaacggcattaaattacagggtcagatcgaatcttttgaccaatttgttattctgctgaaaaacactgttagtcagatggtatacaaacatgctatctctaccgtagtaccttctcgtcctgtttctcatcatagcaatacaggtaccaaccaagcgggtacaaactacagtggcggtaacgcgactcagcaggatgatgttgcagaataattatcaaatattattcttaatataataaaaacataggtagggagactttacctatgtttttcctgtttttataaagtccatgaggtttcgcctttgtttgatcgttatgaaggtggcgaattagccgttttagtgcacgttttcttttcgcaagaaaaggatattgatgacttgcaagagtttgaatctttggtgacatctgccggtgtaaaaccagttcaaattattacagggagccgtagagcgcctcactccaaatattatgtgggagaaggtaaagcggaagaaatcgcagaagcagtaaaagcgagtggtgcagatgtggtgctatttaatcacgcactctcaccggcacaagaacgaaatctggaaagactttgtgaatgtcgtgtagttgatcgcacgggagttatcctcgatatttttgctcaacgagcaagaactcacgaaggaaagctacaggtagaactcgctcagttacgtcatttatcaacccgtttagttcgagggtggacacacttagaacgacaaaaaggggggattggattacgtggccctggcgaaacacagcttgaaacggaccgacgtttgctcagaggcaaaattagtcaaattctaatgcgtctaggcaaagttgaacgtcagcgtgaacaaggacgacaagcgcgaagtaaagctgatattccaacgttatctctggtgggttacaccaatgcgggtaagtcgagtttattcaatcgtataacctgtgcagatgtgtatgctgctgatcagttgtttgcgacactggatcctaccttaagacgaattcaggtcgatgatgttggtaccgtggtgttagctgatacggttggttttatccgacatctacctcatgatctggtggcggcatttaaggcaacgctacaagaaacacgtgaagcgacattgcttcttcatgttattgatgccgctgatagccgttttgaagagaacattcatgcagttgaaaatgtattagaagagattgatgctcacgagataccgacactgtatgtgatgaataaaattgatcttcttgaggacttcaccccaagaattgatcgaaatgaagataatttacctgttagggtttgggtttctgcacaaacaggtgaaggtattcctctgttatatcaggcgttgacagagcgcctttcaggtgagatcgcacacgttgaattgcgtttaccgccagaagaagcagggcgattacgtagccgtttttatcaattacaggctattgagcgtgaatggattgaaaaagacggtaaagttgggctaatcacccgaatgcctatggtagactggcatcgactttgcaagcaggagcctactttattggattacgtggtctgataattggccatactaaagaacattaactgagagctggcgatgaaatcggctcttaagcctgataaatctaatcataataatggagctagaacatggcgtggaatcagcccggtaacaacggacaagaccgcgacccgtgggggaaccgaaacggcggtaataataacggcgacgggaactctaacggtaatcaaggaggtcgggatcgtaaagcatcagatctcgatgatttgttccggaaactgagtgcaaaacttggcggtttcggtggtaaaaaaggaggaaactcctcttctgggcaaaatggcggacctcgtggtaatgctggaaacgtattagtttctcttgcattaggtgctgtggttgtcgtttgggctgccagtggtttttataccattaaagaagccgaacaaggtgttgtgactcgtttcggtaaattttaccaaatcgtcgagcctggtttaaactggaaaccgactttcattgatgaagttcagcctgtcaacgtaaaaaccatccgtgatttaactacgggtggcatgatgttgacatcagatgaaaacatggttcaagttgagataaacgttcaatatgttgtctcagatccagaagcatttctctttaatgtcacaacgccaatgaatagcctaggacaagcgacagacagtgccgtccgtggtgtcattggtcgttcagaaatggaaaagatcctgacatcgaaccgctcagaaattcgtgatcaaacccgtcaagaattagaagagacgatccgcccttataaaatggggatctccattgtggacgtcaacttccaagttgctcgcccaccagaagcggtcaaagcggcattcgatgacgtaattgcggcacgagaagaagagcagaaaaccattcgtcaggctgaggcttataaaaacgaagtgttaccattagcgaaaggtaacgcacaacgtatgattgaagaagcaaccgcttataaaacgagtgtggtgatgaaagcagaaggtgaggtggcgagtttcgccaaaatcttacctgaatatcgcgcagcaccggaaattactcgtgagcgtctgtatattgaaacaatggaaaaagtgttgtcgaaaacacgtaaagtcattgccaatgacaaaggtaacagtatgttggttctgcctttagagcaaatgttacgccagcaaccaaaagcgccaacgtcagttaatagtgtcacagaggcacctgcgcgtatttcaacccctacgccaagtaccaacacaacacctactcagaaaccagcaacaacttatggtaacggtggatatggtagcaataatagtggtggttatggtcagccttatggctctaatcaaggaggacaataatcatgcgtaaagttatcgctgttgttgcagttattattttagcgttgttgtactcctcagtatttgtcgtgcaacaatatgaacgcggtattattttacgtttctcgaaagtggtacgtgatggtgaaaataaaccggtcgtttatgaaccgggtattcactttaaaattccatttattgagaatgtgaaaaaactggatgcgcgtatccaaacgatgaatatccagcaagatcgcttcttatcaggtgagaacaaagacttgttagttgactcttatctgaaatggcgtatcagtgattttagtacttactacctagctactggtggtggtaatacgatgcaagcagaaaccttattgcgtcgtaaatttagtgaccgtttacgctctgaaattggtcgtatgagtgtaaaccaaattatcactgattcacgtggtcgtttaaccattgatgtacgtaatgcgttgaatgaaggtacaccttctcgcgataaaagtgatgcagatgatgctattgctattgctgcgaagaaagtggccgaagagaccaaaggtaaagctcctgctatcaatatgaacagtatggcggcattaggtattgaagtgattgatgttcgtatcaaacaaatcaacttaccaatggaagtttctgaagccatttatcaacgtatgcgtgcagagcgtgaagcggttgctcgtcgtcaccgttcacaaggtcaagaagaagcggtgaaaatccgtgctgcggcagataaaacagtgacagaaaccttagctgaatcggagcgtgaatcgttacgtattcgaggtgaaggggatgcgcaagcaactaaactatttgctgatgcattcagtcaagatcctgacttctatgcgtttatccgtagcttacgtgcttatgagaatagctttaataaagacggtaatgacgtcatggtgttaagtccagatagcgatttcttacgctatatgaaagcaccaactaaagcgagagcgattgaagagtaatcgtcatcgttcaagaaaataaataatcatcccctaagataaaacttaggggatttttttagcttttaatcaagcagatagaattaaaacaaataaagaaaatcgttttttattattgaatgaaacgaaaaatcgctcgcaaccatttccaaattgcctttagctgagatagtataaagtgaaaattgcatttcaagataaaccttcggcaatcccgaggcgtcttcttagccattttcacttttatgtcactctgcttcctgtttttgcgatcaaaactgttgataaaaatcacaaatatcttgtgatgtggttttttcgggcaaaaatattgacaatggcaagataatctattgcttaaaagcggggatggcataattagataaaatctactgtaactcttgaattgagatggtagaatccttttttaagcaaccgagtgtattttgaaatgagtaataacgttgtcgtattaggcacccaatggggtgacgaaggcaaaggcaagatcgtcgacttgctgacagaacgcgctaagtatgttgttcgttaccaaggcggacataacgcaggtcacaccctagtcattgacggtgaaaaaaccgttctccacttaatcccatcaggcattcttcgtgaaaatgttgtcagcatcatcgcaaacggtgtcgtattatcgccagaagcactgatgaaagaaatgacacagctcgaagagcgtggtattcctgttcgttcacgtctactgctgtcagaagcttgcccattaattctgccttatcacattgcattagataacgcccgtgaaaaggcgcgtggtgagaaagcgattggtactacgggtcgtggtattggtcctgcttatgaagataaagtcgcacgccgtggtttacgtgttggtgatctatttgataaaaaagcattcgctcagaagcttaaagagatcatcgaataccataatttccaactggttaattattacaaagttgagcctgttgattaccaaaaaaccttagacgatatcatggcgatcgctgatatcttaactgggatggttgttgacgtttctgacttactttacaaagcaacacaaaaaggtgagttagtgatgtttgaaggggcgcaaggtactctattagatatcgatcacggtacttatccgtatgtcacctcttcaaataccaccgcaggtggtgttgcaacaggttccggcttaggtcctcgttatgttggttatgtattaggtatcattaaagcctattctacccgtgttggtgcaggtccattccctacagaattatttgacgaaaccggcgatttcctgcgtgaaaaaggccaagagttcggtgcaacaacaggtcgtagtcgccgtactggttggttagatattattgctatccgccgtgctgttcaaatcaactcattgtcaggcttctgcatgaccaaacttgatgtcttagatggtctgaaagaagttaaagtgtgtgtaggttatcgcttaccaaatggcgaagtgattgaaactacaccattagcagcagatgattgggaaggtattgagcctatttatgaatctatgcctggctggaacgaaagcactttcggcgtaaaagataaagcacagttaccacaagccgcgttaaattatattaaacgcgttgaagagttaactggtgtgcctgttgatatcgtttctacaggtccagatcgttcagaaacgattattctccgtcatccatttgatgcataatttattgtattaattggtttgatgtgaaaatcgtccctgaaaatgacaggggcgattttttcgtatctgtaacaaagccgaactgagtcactatgttgattagcaataaaacgagaaacagtttcccgctcggttgcgtttttgttttagggctatggtcagaagtgaaataagataacgttattttgttgtcaactaagagaagcgatctgttgaaaagcgacaggatcgctttttctttgcctgtgatatcgctattattttaatggttgtggtgagtaagcctaaaagcgcggacttttgagtatatctttgctaaatgtccaaaaattaaacataatattgcttaataaaatgatattctcattactcattatttatcctttaacttctttaactgggagttttacttttcagaggtcattgtgcaattaaccagttttacagattatggattgcgggcgttgatatatatggcttcattgccagaaggcaaaatgacgagcatcaccgaagtgacgcaggtctatggtgtgtcacgtaatcatatggttaagattattaatcagctaagtcatatgggatttgtcgaagcgatacgtggaaaaaatggtggtatacgcttaggtaaacctgccgctgatattattgtcggcgaggtcgttcgtgctttagagccgctttcactggttaactgtagtgctgagttttgtcatatcaccccagcttgtcgattaaaacttgtattaaatcaagcgatagaacagtttttgaaagagctagaccgtcatacactggctgaattggtagaaaacaacagccccttatataaattgttattagaagatgtttgagtcgacaatttcatcattctgatagcttggaggtcataatgtccaaagatccttttcaggatagagaagccgaaaaatacgcctctccaattgctagtcgtgaatttattttagaagaaatgaagaaacgcccggccccgatgagccgtgaagatatcgcgcaggcattgaaaatttcaggtgaagaaaatctggaagcattacgtcgtcgtttacgggctatggaacgagatggtcagttagtttttactcgacgtcagtgttatgccttacctgaacgcctcgatctttggaaaggtaaagttatcggtcaccgtgacggctatggttttttacgtgcggaaggccaaaaggatgatctctatctttcacaagatgaaatgaaaaaaaccatgcatggtgatgtgattttagcgcaacccctaggcatggatagaaaagggcgtcgagaaggtcgcgtcgttcgtgttcttgaacccagaaacagccaaattgttgggcgctattttattgagtcaggtatgggatttgtggtacctgacgatagccgtttaagttttgatattcttatccctaaagaagatatcatgggcgcacgtatggggaatgtggtggtggttgaagttaccacaagaccaacacggcgtactcaagcggtaggacgcattgttgaaattttaggtgaaactatggggacgggaattgcggtagaaattgcactacgcacccatgaaattcctcatacttggccacctaaagtagaaaaagaaatcgctgatttaaaagaggatgtgccagagtcagcgaaacaaggtcgcgttgatttgcgtgatctccctttaattaccattgatggtgaagatgcgcgagactttgatgatgccgtttattgccagcgtaaaaaaggcgggggctggcgtttatgggtggcaattgcagatgtgagctattatgtacgccctcaaactgcattagacacagaagcgcgtagccgaggcaattcggtctattttccttctcaagttgtccctatgctgccagaagtactgtcgaatggattatgttcattaaatccacaagtcgaccgtttatgtatggtttgtgaaatgaccgtttctgagcaggggcgcctttcatcttataaattctatgaagccgtaatgagctctcatgcgcgaatgacttacaccaaagtatggaaaatcattcaaggtgatgaagagttacgtgagcactaccaaccgatcgtaaaagatattgagcacctttatgagctataccaagccctcgataaggcccgtgaacagcgtggtgccattggttttgaatcggaagaagcgaaatttattttcaatgcagaacgtcgtatcgatcgtatcgaaccggttgtacgtaatgatgcacataaattaattgaagagtgcatgattttagccaatattgcggcggcgcgttttgttgagaaaaatgaagagcctgcgttatatcgtgtgcatgataaacccaaagaagagagcgtaatgaatttacgttcggtatttaatgaactgggtttaacgttaccgggaggattaacaccggagccaggcgattatgcgcgggtcatgaaagaagtcgaagagcgtccagatcacgaaatgctacaaaccatggtattgcgctccatgaaacaggcaatttacgatcctgaaaatcgaggtcactttggtttagcattaaaatcttatgctcacttcacttcacccatccgtcgttatcctgacttagcattacatcgtgctattaaataccagatagcgaaacagcaaggccatggctcacaacgctggaccccaacgggtggctatcatagtgatatggataccatgcttcagttaggggaacactgctctttaactgaacgtcgggcggatgaagcaacccgtgatgtggctgattggctgaaatgtgattttatgcttgatcaaataggtcagcaatttaccggtattattaccagtgtcactggtttcggtttctttgtgcgcttaaacgatctatttattgatggtcttgttcatgtatccacattaaataatgattactatcaatttgataatgttggacaacgtttaattggtgagtcatcaggtcaggtatatcgtctgggtgatgaagttgaagtgaaagttgaagcggtcagtatggatgaacgtactattgacttctcattgatttcaacaacacgtaaagcacgtaaccccgggaaaacagcacgtgttcgtgcgttaaaagggggaaaagacaagaaaaatgcgagcagtagtaagtctcgtcgtcgtgatgccagcaaagacaaaaactttgaacctgatagtgcctttaggaacggtaaatcaagtaaagaaaaacagagcaaagataaagtcattaaagagaaaattgcgaaggacaaggcgagtactaaacgtaaaaaagcctctgcacaaaccaaaaagatagaggcgaaattaaaagccaaacgtgcggcgaaacgcactaaagcgtagttatacaacgaagtcattcactgtttgactcctattaaaaaggcggattttccgccttttatctgttattgtgccttttattttttaacgagtaacaaccgctatgagcgaagatattatttatggtattcacgcagtaaaagcactgcttgagcgtgatccgacacgttttaaagaagtttatgtgttaaaaggacgcgaagatcgtcgtttaatgccggtgatccatgcgctggaagaacaagggattttagttcaagttgctaatcgccaatggttagataatcaaactgaaggtgcggttcaccaagggataattgctaaggtaaaacctagtcgtcagtaccaagaacaagatttaccggacttattagctgaagtaggtacaccttttctattagtgttagatggtgtgactgatccacacaacttaggggcatgcttacgtagtgctgatgcggctggtgttcacgcagtcattgtaccaaaagatcgctcagctcaattaaatgccacggcgaaaaaagtcgcttgcggtgctgcagaaagcgtacctttgatccgtgtaaccaatctggcacgtactttacgcttactacaagaagagaacatctggattgttggcaccgcgggggaagcggatcatacattatatcaaagcaaactcacagggcctttagctttggttatgggggctgaaggtgaaggaatgcgccgtttaacccgcgaacattgtgatgagttaatcagtattcctatggcaggctcagtctcttcattaaatgtctccgtggcaaccggagtttgtttatttgaagcaatgcgtcagcgtatttctgtaaaataacactgcgcgtattttattctcttcctcccttgagttttattgcgtgggggggtatagttacgcgtcaattttttcagtcacacttaaacaagttccttgcctccatgggtggtgactgaccctgacaggaggctgataaatccgtaaggagcaatatcaaatgcgtcattacgaaatcgtttttatggttcacccagaccagagcgaacaagttcctggtatgatcgaacgttataaaaccgctatcactaatgctaatggtcagatccaccgtctcgaagactggggtcgtcgtcaactggcttatccaatcaacaaactgcacaaagcacactacgttctgatgaacgttgaagctccgcaagaagtgattgatgaactggaaactactttccgcttcaatgatgccgtgctccgcaacatgatcatgcgtactaaacacgcagtgactgaagcttcaccaatggttaaagcaaaagacgaacgtcgtcgcgatgttgctgaagatcttgatgaagaagaagttgatgatgtagcagaggattctgaagagtaattagtgttgtgacggctaatcgattagtgctaacaggcactgtgtgcaaagcattgatacgaaaagttagccctgctgggatcccgcattgccaatttgtgattgaacatcgttcaacacaagaagaagcgggattaaaaagacaatcatggtgcagaatgcccattattgccagtgggaaagcgttacaaactgatactcacagtataacggtcggtagcaaagttaccgtttcaggattcattagtagccatcaggcgagaaatggattgtttaaactggtattgcatgccgaacagattgaattgatagattctggagactagccatatggcacgttatttccgtcgtcgtaagttctgccgtttcacagcggaaggcgtacaagagattgattataaagacatcgctacgctgaaaaactatatcactgaaagtggtaaaattgtaccaagccgtatcaccggtactcgtgcaaaataccagcgtcagctggctcgtgctatcaagcgcgcgcgctacctgtctttattaccttatactgatcgtcatcagtaataggtattatatagtccattaatgacttgtagaggataaggtaatgcaaattattctgcttgataaagtagcgaatctgggtagcctgggtgatcaggttaacgtaaaatcgggctatgctcgtaactatttaatcccacagggtaaagctgtttctgcgactaagaaaaacatcgagtttttcgaagcgcgtcgtgctgagttagaagctaaattagctgaaactttagcggcagctgaagctcgtgcagcgaaaatcactgcactgggatctgtcactatcagctctaaagcgggtgacgaaggtaaactgtttggttcaatcggtacacgtgacatcgctgatgcagtaactgcagctggcgttgaaatttgtaagagcgaagttcgcctgccaaacggcgttctgcgtacaactggtgaccacgaagttcacttccaagttcacagtgacgtattcgctgaactgaatgtaatcatcgttgctgaataatcattagattaaatagttatgttgatagaaaaacgccagcttagctggcgttttttatataggttatttgctctatttctccacaccgcttgttgacactatggcgtacgataataactaccatcacttagccgtgtgaaggtaataacagtaccggtattgtcagtcacttcaagcatactcacttcaccttgtgaacctcgttgtaaacgaatggtttgtccggcgcgtaactggcttaacggcttttgtgggccttctgatttcgccatagtaaacgcatcattgacaagcaactgattatctctaaatagttgtgcaagggtttgcccctctttaatggtataagtttgccaattttcagtcgcggttgacggtgtttgaggcgttgtgtttactggcgtattgtcattggtattattggcttcaccttcttctggtaagtcttctgtctcttgctcagcatttagactatcttgtgctggtggtagtgtattagggacattttgtgtttcatttgagacagaaggtgctacaggcacaggaagatcttgtgtcgaagatgagggttgaggtggggtggtattttcacttgttggccagaaaaaaacgactaacaaaataatggcaataacaacgattgctcgacgatgtaagcctgggaatttgcccatattcacctcatgattgaactgtgaatcactatcactaattgtaacctcttttttatttcttgttgccatactagcacgaaccatgatccttacctgctccctgaattcttttcagaattatctctttaatttgattacgtccttgaaggtgttaccaaaagcacccgatgcttaatcgtctatagttgtgggattaagcgagacagaagaatactgagtgttatctattcaacggcattatgtggcgaatgtttagcatttatttgtttaatagacttactctgcttaatcaaatgttctatgttgcctcaccccttgcaacatgtagagatgccactatcactaataggtatataaaaaaaatgatcaaaaaaactagccattaaaataaaaaggcgctacattatcgcaactcaatattgttatattataacattacataaagaaggcgagtatgaaagaaaatattcatccacaatatcgtactgtcattttccatgacactagcgtagatgcttattttaaagtgggatcaaccattcaaactgataaaactattgagtatgaggggcaacgctatccttatgtcactttagatgtctcttctcagtctcatccattttataccggtaaacaaaaaacacattctcaagaaggtaatgtggcacgctttaataagcgttttggccgatttgttaattagggaagaaaaaatgcaagtattaagttcattaaagagtgcgaagctgcgccaccctgattgtaaagtggtacgccgtcgtggacgtctgtatgtaatttgcaaatcaaatccacgttttaaagccgttcaggggtaacctatgcaaaaaccaatcctttcttgtcttttgattatgggttttttaggtagtgctatgtctgttttggcacatggacatcatcatgaaaaagtacgcacacaagcacaaatagatgctgcgaatgggatttttgaggacaaggacgttctcaatcgctcattaagcgattgggatggcgtatggcaatctgttgaaccctatctgcgtagtggcgaattagatatcgttttgcaaaagaaagcggagacgaagcaagataaaacagtagaacaatatcgagcttactatacacaaggctataaaaccgatgttgatatgattggtattgagaataatatcgtagagtttcatcgtggtgataaagtcgatagctgtgaatatcactatgatggttatcgtattctacattatcaatcgggtaaaaaaggtgttcgctatctgtttagatgtgacgatgccaacagccaagctccacggtttattcagtttagcgatcatattattgcaccagaaaaagcacagcattttcatctatatatgggaaatagttcacaagatgaattacttaaagagctaactaattggccaacctattacccttattcaatgaaaggggaagatattgttcatgaaatgctttatcactaattaaagtgaagaaataacctattgggctgacatcaatacccttgatatttatcgagggtattgtttatccaaagcaccgtaaaaccccgtccttcaggtcggggatataaggcgtggttttttaactaactcggtgtttcctgttgctcaatgtactggcggataatggatattggtgcgccaccacaactccccgcgaaataactcggcgaccaaagaacccccttgtagtaatcacgttgtgcaatatcaggacgatcacgtcgaagtaatcgactcgatacccctttaaggctgttaaccagattagatatcgccagttttggcgggtaattaatcagtaaatgaacgtgatcccgttccccatccatttcaaccagttcaacatcaaaatcagcacaaacactggcaaagtagcctcgcaatttttcaattgcatcctgatcaaatatttttcgccggtattttgtgacaaagaccaaatggacgtgcatcaggaataaacaatgtctgccacggcgaatattagtttcatttttcatagaccaaagtataatagataatatgaaacgtctacaagcctttaaattccagttaagacctaatggtcagcaagagcgtgagatgagacgctttgcaggggcttgtcgttttgttttcaatcgggcattagcacgtcagaatgaaaaccacgaagcagggaataaatacattccctatacaaaaatggcttcatggctcattgagtggaaatctgacacagagacacaatggttgaaggaagccccatcacaacccttacaacagtcacttaaagatttggaacgggcttacaagaattttttccagcagcgtaccgcttttcctcgattcaagaaacgcggtaaaaatgacgcttttcgctacccgcagggcgtgaagctcgatcaatccaatagtcgtatatcattgccaaagttgggatggatgcgctaccgcaacagtcgtgaagtcgtcggagaagtgagaaacgtcacggtcagtcagtcatgcggtaaatggtacgtcagcattcagactgagcatgaagcgacagaaccacaacatgaatcaacctcaatagtcgggcttgatgcaggcgttacaaaacttgccacgctttcagacggtacggtatatccgcccgtcagcagttttaaagtcaaccagcgaaagctggcaaggcttcaacggaaattaagccgtaaaatcaaattcagtgccaactggcaaaaacaaaagcgcaaaattcaacgtctgcattctcatattgccaatataaggaaagactaccttcacaaagtcaccagcgaaatcagcaaaaaccacgcaatgattgtcattgaggacttaaaggtcagtaacatgtctaaatcggcaaaaggtacgacagaacggcctggacggaacgtaaaagctaaatctggtttaaaccgctcaatactggagcagggctggtatgaaatgcgccgtcagcttgagtacaagcagctctggcgaggtggtcaggtactggcaataccccctgcctacaccagtcagaagtgcgcttgctgtggtcatacagcaaaggaaaaccgccagtcacaaagtcaattcgagtgccttgaatgtggatatacagcgaatgctgatatcaacggggcacgtaacattttagcggcaggacatgccgtgctagcctgtggagggagggtgcagtcagaccgcccgtcgaagcaggaacccgccgaggtgattcagacatcagtctgaacgcagtagggatccacgtcctttagggcgtggaggatgtcaattaataagagataatggttgcaaaaagcaatcgcgtccttgcgatgacttttactgttaatcagtggcctcgtttacaggccttggcagaggtatttcatttccatatagtcctcaataccatgctcagagccttcacgacctaagccagactgctttataccaccgaaaggagccacttcattggaaattagacctgtgttaataccgaccatgccatattctagattttcagccacacgccaaatacgttgtggatcttcactgtagaaataagcggctaagccatagatggtattattggctagatgtactacttcttcttcattgtcaaaaatgactaaaggtgccacggggccaaagatctcttcttcaagaatatgactatcagcaggcacattaccgaccacggtaggctgaaagaaattttcacctgctttatctctttcaccaccacatagcagtgtcgcaccgcgttgtaaggtatcagcaaggagtgattgtgatttttctaccgccttatgattaataagaggcccaatagtcacgccttcggtaaagccattaccgacttttagttttttaacctctgcaacaaagcgttcactaaattgttgatatacatctttatggatataaaaacgatttgcacacacgcaagtctgtccggcgttacggaatttcgcccccatagcacctgcaaccgctttctcaatatcggcgtcattaaagacaataaatggcgcatttccccctagctccagtgagacttttttcacactgtcagcacattggcgcattaataaacggccaacccctgtagagccagtaaaactcaatttacgcacgcggttgtctgatgtgaacacttcaccgattttaactgcatcaccggtgacaatattaataacaccggcaggtattcctgcttgcgcggctaattcagctaatgcaagggctgtatagggggtttcgttggcaggttttatcaccatagtacaccccgcggctaatgctggggctgctttacgggtgatcatggcagcagggaagttccaaggtgtgatagccgcacaaacaccaatcccttgtttgatcaccattagacgcttatctgatgaaggggaggggataatttcaccgttggttcttttaccttgctcagcaaaccactcaataaatgaggctgcgtaggtgatttcgccttccgcttcggccacgggtttaccttgttcaaacgtcatcagttctgcaagttgacgcttgttatcctgtatcagttggaaccagcgttgcagtaaagtgcttctttgatgtgcggttaacgcacgccatgtcggtaatgctttggcggctgcatcaacagccgctttggcttcttctgttgccatatttggcacagtaccaatgggctgatttgttgcaggatcaatcacttcaaccgtgtctttgctttttgcatcacaccaaataccgtcaatatatccttgttcacggaaatagggattgtcagttattttcacttcgtacctctctgaacatatatattgatattgagcgctgggttaacagagctaccttgtctttaattatatgcttgtgtgaggggcttgtgaaaaaaagtctgaaaaatatcgtcaagaaaggtcaaaatccatgacaaatagcgcaaattgatggcgttttcgacgaataatcgcgattagccaagacgggaggtttacgctctagcttaccactgttattcttggcactaactttcataaaaacaggtattttttcatgtcaaaaccatcatttgattctattgaatcgcaggcaagttacggtattggtctgcaagtcggccaacaactgactgaatcaggtcttcaaggattagagccagcagcactgcttgccggcttgactgacgcgttagaaggcaatactccttctgtacctgttgaaacgttacacaatgctttacgtactatgcatgagcgtgctgaagctgttcgtcaagagcgtcaagcggcactggcagaagccggcaaagtattcttagcagaaaatgtaaaaaaagaaggcgtgcaggttactgaatctggtttacagtacaaagtactgaaagcaggagatggcgctattccagctcgtactgatcatgttcgtgtgcattatactggtcgtttaatcgatggtacggtatttgatagctcagtacagcgtggtcagcctgcagaattccctgttaatggggtgattgcaggatggattgaagcattaactttgatgccagtaggttctaaatgggaattatatattccttaccaattagcttatggtgaacgtggtgcgggggcggctattcctccttttgcaacattagttttcgaagtagaactattagaaattttataatttcttcttctgcaaaaaataacactatagccggttttttccggctatttttgtctctatactagagtaaagagagtgcaagataattgatttttataagagtgagtaccattcttataaaaataagtgaggtgcattatgttagaacaagtcagcgaattagcccgccaagcgggtcaggcgataatgcaaatttatcaacaatcagcgccaattgaagtacaggaaaagagtgaccattcaccggttactgcagcagatttagccgcccatcaaattattaagcaaggacttgccagtattgcgccagatattcctcaattatctgaagaagatcctcctgcgtgggaagaacgtcgccattggcaacgttattggctgattgatcccctcgatggtaccaaagagtttatcaataaaaatggtgagtttacggttaatattgcgttgattgaacagggtgtgccggtattaggcgttgtgtatgcaccagtacaaaatattctctactcagcagccaataaacaggcatggaaagaaacctgtggtcagcgtttaccaataaaagtcagccgtgctgaaccccccgtgattgttattagtcgttctcatcaagatgatgaattaaaagaatatttatcgcaattgggtgagcaccaaacagtggctgttggatcttcattaaaattttgtctagtggcggaaggaaaagctcagctttatcctcgttttggacctactcatacatgggatactgcagcaggacacgccattgcgatagccgcaggggcacatgttaccgattggaaaggggtgacacttgattattcaccgagagaatcactgataaatcctggttttagagtttctattttctaatgataacgagagcagagcccttaagtttaaagggctccgatacagataatttaaatactattctttaattaagtcattgataaggttaatggcggaagttatttctgcaccacttaatacaccttctttgacaaaacgaacttttccttgtttatccagcacaataattgctgaactctctttttctagtccccaacctttttgcgctacaccatcagcatcaacaataaattgtgaccaaggaaactcttttttactgtcttcaacactaccgcgaacaaaaggcccagtaccaaagatagcatcatcagtattgatgatagtggttgtctgataactattttgtggaaatttggcttgtttgatggcttcaatcagtggcgcattcatctctttagccttactgcgtccagcgatatgttgaattgtgcgtactttgccactaagtagtccgctattccaattttgatagctaaatttatctttggcaccatcataaagaagctcccctttgtcactcacagagatcgccggtaggagagtttcttcagtaatattatgggcaaatacccatgtagatgtgctaagcaaaagtgcagccaaggttattttgtgcatcgttattgtcctattattaaattcgactttatcggctatttaagcatagaggctaaaaaagaataatacctcattgttgatacatttttttaacatatagggtgtaagataaagtattcacagtctcgacttatcttctttactgtcaataagtgtaaaaatagataagaaatttaaataaatggaacctagtacttataattaggtctttaaatttggtatataaagatcggtctttatgactgattaaattcacaactgagcatgggagactaactgaaagatgaagatcttcaatcgctataacccagaaaaaattgctctctacgttaagacgttatttcgtggacggttttatatcaaaggaatgggcgcatttgagttcgattacggtaaaattttattgccgaaaataaaagataagctgcattttaatgtgatgagtgaagttaaccagcaggtggttttactcaaagctgaaatgggctaacttttatctgatagataactgagtctatatcttgtgcttttacgataagactcagttattaatttcagtttgttaccagttgatttaggctttatgctcttcgtgctcaaaaggcacttctgccgttgtttgaggagcaggtattgcttcttgcaaaaccggttttactggcggaatatcatcaattttagtgacaagcagttgatcaattttatagttatcaatatccaccacttcaaatttataacctgcaaacttcacatagtcagtacgtttggggatcttacgcaaacggaacatcataaacccagcaatggtttcgtaattgctagaatccgggaaatcatcaatatctaatgcccgcataacatcatcaataggtgttccaccttcaaccaaccatgaatgctcatcacgactgacgatttgctcttcttggcccgggccaatcagatcgcccattaaagtggtcatcacgtcatttaaggtgataacgcccatcaccatcgcatattcattgagaataatggcaaaatcttcccctgaggttttaaagctttctagcatgtcagataaagttaaggtatccggaataataagggctttacggatatgcacaccttctttgaggttaagactttgcccattgatcacacggttgagtagctcttttgaatctacataaccaataatatggtctatatccccttcacaaactaagaatttagagtggggctgagtggcaattttatgcttaatatcttcttctgtctcttcgcgatcaaagtagacaacatcttcacgtggtgtcatggctgatggtacggtacgtgattctaattcaaagacattttcaattaattcgtgctcttgtttacgtaatacccccgctacggcaccggcttcgacaatcgcaaagatatcatcagatgtaatatcttcatttcttaccatcgggattttaaatagtttaaagataagatctgccatgccattaaacaaccaaactaaagggcggaataaggcgagacaaaaacgcataggattaacaattttcagtgcaatgacttctggcttgatcatgccgatacgtttaggagttaaatcggcaagcagaataaacatcgatgtgacgataataaatgaacagaccgatcctaattgttgcgcgagaggtgcttctaaaaagcgggaaaagagatcttttaatgcgggagaaaaagcagattcaccgacaatacccgccaaaatggcaacggcgttaagaccaatttgtaccacggtaaaaaacataccgggggtttcttgcatttttaatacacgagcagcgttgatatttccttcgtcaaccaactgtttgagtttaatacgacgggaggccgccagtgatatttcagacagcgaaaaaaaggcgctaatggcacacagcaaaagcacaatgagtaaactattaagcatataaggctcacatcacccagagtattaaatccagagggtaatacttgagtgttaataatcgaagataaatcaatatattgtgatagactattttataaaaatagacacaaagatagataagagggcgtaattatatcatcgccctgctattttctgctagtgttagtttgccggtggaaaacagataccaatgccaccaagtccacaataaccttgagggtttttaaataggtattgctgatgataatcttcagcaaaatagaaaggtccggcaggttgtatttcagtggtgatctctttatgtgccccttcactattgatagcttgttgataacgttgttttgactcaatagcttgtgcatattgctctggggttagggtataaatggccgagcgatattggctaccaatatcattaccttggcgcataccttgggaagggtcatgattctcccaaaaaatagccaataattgttgatagctgataagggtcggatcaaataccacacgaacgacctctgcatgaccggtacggccttggcaaacttgctcataggtgggattttctgttacaccaccgctataaccggcacttgtgctataaacaccgggttgttgccaaaataggcgttcaacgccccaaaagcagcccatggcaaaataagcaatttgcatattttctgggatctcacggatagaatgcccattgacggcatgattagcagaaatttctaatggcgttgtgctgccgattacggcatgctcaggatgataagctttatgttgcaaggtaaactccaaattttatatttgtaaacgctttactatggtaaaggtttaatattgttataaactaaatctacaataaagcttaaaactatttgtcgtcaattaccgaatgatataaataatattgaggagaaaacgtgccgagatactccgttatctacgttctctgtctgtcttctataacgtcttttgcttatggggcaaatttacgtttaaaagtagaaggtttagaagggcaactcgaaaagaatgtacgagtccagctatcaaacataacaacagaagaagttgcaccagacgggcgttttcgtgcgcgtgttgaaaaggcaattaaagagggcctacggcctttaggttattatcagccaacggtcactttctcttatcaagaaaatacccctccgacacgccctgtattaacagcaaaggttgagcttggtattcccgtactgttaaaaggggtcaatattgtactggaagggggagctaaaacagatgaacaatatgccaaagtgattaaagaaaacactccccctcttgatagtgtgttaaatcatgccgaatatgaaaaattaaaaggctcgttaacagggcttgctattcgtcgtggttactttgatgcagatatggaaaaaagccagctcggtgtctctttagataatcacgcctcttattgggattttgtctttaatagtggtgaacgttaccgttttggtaaagtgaattatactggctcacaaattcgtgaagactacctacaaaatattgtgccttttaaagaaggggaatattactcttctgaagatttggcagagtttaatcgacgcttagctgccacaggatggtttaattcggcggttgtcacacctaatatcgctaaagcacgtagtgaaggcaattatttgctaccaatggatgccgttgttacccctcgttcacgtaactatatggagctagggggcggttttgccacagatgtcggacctcgattaaatatgcagtgggataaaccttggataaattctaggggccatagtttaacatcgaatatgagtatttctaagcctgagcaatctattggtgctaattataaaattccattaaaagttaacccattagaacaatattatggcattcaaagcggctataaacgtacagatttaaatgatactcgttcggataccaccacactgaacgtttctcgtaactgggatatgtcaacgggatggcaatacagtattaatacccgctggagtctgagccactttacccaaggtgatgtgaccaatacaaccatgttgctttatcctggtgcgaatgcaagtcgcgtacgccaacggggtggcatgatgccttattggggggatagccaacgttattcagtcgattattccaataaaatatggggatctgatgttgaatttctcgcactacaagctcagcaagtgtggatacgcacaccttgggaaggccaccgttttgtggtcagagggacgtttggctggattgaaacgaatcaatttgagaaagtaccacccgaattacgtttctttgctggtggcgatagaagtattaggggttataaataccaaagtatttcaccggaagatagcaaaggtaaattaacaggggcatcaagaatgctaacgggatctgctgaataccaatataacgtaactggaaattggtggggagctgtatttgttgatagtggtgaagccgttaacgattttacgaaaagtgattttaaaacaggtgctggtgcgggggttcgttgggcatctccagtcgggcctgtaaagtttgatttagccgttccagtcaatagtggtgaagagcgtaagttacagttttatattgggttaggagctgagttatgatgaagtggttgaaaaggataacactaacgctacttatcatcattttactggttttaggtgctcttgcatggattttagggacgcaatcagggctacattttgccattaatagtgcagctcgttgggtgccaggtttaaccattaacagtgttaatggcggttggcaagatttacgtttaacgggtgttgagtatcaaatgccgggtgtagacgtcaatgtgggggagttatcactaggcttaaatttaagctgcttgaaggacaaacaactgtgtgttgaggccttaggcacacgtgatgttatcgttaatgtagataccagtgcactccctccagcacaagaaacacccccttctgagcctttaactgagcttaatgcccctttacctatctatttaaactctctctcattagccaatacgcgtgtacaaattgatgatatggccctatcactcaatgagtttactacggcagcacaatgggaagggcgtcaagttaccttaaaaccgacagtcattaatgatttgttggtggcgttaccgaaaacacccgaagacggtagtgttgccgccatggcgcaagatgtaaaagaagttgcagcaacgacgcctcaagcggagcctaaaacaccgcaagagcaagagcaggcactagctgacactattaagacaattttcgccaagcctttattagcgcagttacccgaaattattattcctgttgatatcaatgtggaggggatagaaggtaaacagttacaagttagtggtgatacgcctgtgactattaatcaactctcttttcaagccaatacgcaaggtcaacaggttaatctcactaggctcagtattgatgcgccagaaggcaaagtcagtttaaacggtcaaattacactggataaacagtggccggttaatctagatatgcaagcgatgcttcgtgagatggcaggattggaagagtttaaagatcagcaagcgacactgtccttacaaggtgcgatacttgatgagttaaaactcgcactctctttaacaggaactgttaccgcaagccttgatgcacaagctgagctcgctaaagcacatcttccactaaaattaaccttagagagccaaaaagtgcgttggcctttaacgggagatgtgcagtatcaacttaatgatactcgactacgtcttaatgggcagacggataattatgatctttcattacgttctaatattgaaggacaagagatccctccagccaaattgaccctagacgctaaagggaatgaagagaaaataacactcactcgtttgcgtttagctgcattacaaggtcatgcggatattaccggtgtggcagattggagtaaggcgattagctggaatgcattattgactatctctggtattaatacagctaaacaatatcccgatatgccagcgaaattagatggacgtattgctacaacgggtagcctgtatggaggaagttggcaactgcgagtgcctgaaattaccttagatggtaatttaaaaaataatcttattaaggcgcgaggaaacgcctatggtaatgattcggggcaatggaatattcctcaattaaccttaattctaggtaaaaataatctcgatattgcggggcacttaggtgatcagtgggcgcttgatgcgaacatcaatgctccggggttaaatggtttagtgccggggttagcgggcgttattaaagggaaagtgaatgttcgcggtgatattaataagccgaaaattattgctgatatcaatgcacaagggatcaaatggcaagatcagctcagtgttgggtcagttgtcgttaaaggtgacattcagtcagatgacgtgatcagtggcaaactggcaattacggcacgtcagttaaaacaggctgatttgattattcgtcaattaacgctagatgcggccgggacagaaaaacagcataagcttaccttgaaaatggatggggaacccgtatcgggtggcctgacattagccggctcgtttgataaagaaaaacagcagtggcaaggcacacttaacaataccgcatttgatacgcctgtaggcgaatggcgtttaaataaagcgatggcgctaaatttattagcggaaaaacagcaagtgacgattggttcacattgctgggtaaatcctaatgcacaactgtgtgtacctaaagagatcactgtaggtgagagtggtagtgcggcaatcacgttaacacgttttgatttagccatgataaaaccattcttacctcctgaaactgcgctacgcggtgtctttacgggagatgcaacggcaacttggaatgcgaaaggcggattacctaaagcgtcagttaaccttaaaggtcagggcgttggtgtaaaacaaaatgtcgatggtacggtattacctattgattttgatgcagttacgttaaatgcgggtatcaataatggtaaagcgaccttgcaatggttaattagtattgccggtaatggtgactttaaaggtcatgtcaatgttgctgatctagaaaaaacacgtcaattatcaggtacggttgatattgataacctgacattagatctgattaagcctttcttgggtaaaggtgaaatagcacaaggtagtgtaggggcacagctacgtttaggagggaatgcacaatcaccattgctatttgggcagtttggtattaaccagttaaaagtagttggtcactggatcccatttgacattaccaaagggaatgtcgatattcgctttaatggtgcgacttctgatttaagcggtagaatcgaaacaccggaaggttatttaaatctgacggggaatgcggactggcgcaaactagatgagtggcgtgccgtggtggctgcaaatggcaataaactgcgtgtgtcattaccaccaatggttcgtattgatgttaacccagacttagtttttgaagctaatccacatttgcttaaattagatggtcgtattgatatcccttgggctcgtatcgtggtgcaggaattacccgagtctgcggtgtcggcctcttctgatgaagtgatgttagacaaagaattacaacctatagcaccaaagcagacttctatacctattcaaagtaatttggcgattaatattggcgatgatgttacattagatgcctttgggttgaaagccagattaacaggggcattaaaagttgctcaaagtaagcaggggttgggattaaatggtcaagtggatattcctcgcggggaattcaaagcttatggacaagatttacaagtacgtaaagggcaaatcttgttctcagggccggttgatcagccatacttaaatattgaggcgatacgtaaccctgataatacggcagataatgtcattgctggggttaaagtcaccggacttgcggataagccgaaagtggaaatattctctgagccggccaaaacacaacaagaagcattatcctacttgttaagaggggaaggattagcaagtggtgattctgattcagcacaaatgacagccatgctaataggattaggtgttggacaaagtggacaactcgtaggacgtattggcgaaacctttggtatttctgatttagcgttagatacacaaggtgtaggggatagttcacaagttgtcgtcagtggtaagataaccgatgatttacaagtgaagtatgggatgggtatatttgattcgctagcgacgttaacattacgttatcgcttgatgcccaggttgtatttacaagcagtgtctggtatgaatcaggcaatagatctgctttatcaatttgagttttaatttatatgcgaattattgtttatggaagtttacggcgaaatcagggtaaccatcactggatgacctacgctcagctattaggtgagtataaattagcggggtataaactctatgatttagggttttatcctgctgtggttgaaggtgatggtgaaatagaatgtgaagtttatcggatcacgccttccattttgacggagcttgatgaactgaaaaaaaatgatcaagattacaagcgccagttgatatcaacaccttatggtagtgcttggatctatctttatcaaaagccagttgatgggttgcgagaaatcaaaagtggagattggctaaaacgccacgaagaagagtaataggcttacgaaagctgactcaataatgattaaaaaagctcgatatatatcgagcttttttatttttactaaaagtagtatttatattttaaaatttaaataaataattattacttcgttttttatctaaattgatatgaaaataattaatggtagagctgattgacagaaaaataacttcagtgttaaaacagttttgcttaagaaggaaagatataacgacttattattaaatagcgaaacaaggtaatttatggacaaattaaacgatattactcaactttataataatccaccaaaagatgtaaaacataatatagtcaatcatcgttttacggatatgatgctacaaactaaaactgttgcaacagaagcattagataaattagcttatcttgcaggtattaaaaatgcacctgctgatgataagtatttaaaattaaacaccactagcttagatgcgttactaaaaagtgcgaagtcacttggttatgatatcgaagtcgtcagtctttaatcaataagcagccataaggctgctttttaaatgaaaggaggcaatagtgaataaggatattaatgaacttaataaagatattaatattgtcggattacattggattgaacgctggcgagtgaataatggaaaacatcagtcttatgttattcctttcgcaacaacctatcctattaatattgtttatcacggtaaaagcgaatttaaatatgggcagtatggcattcatcttggccagcaagatacactcacctttttaggtgataaaaaacaaaagatactggctaaatttattgattgtcgtaaaaactcaccgacatttaaatcagaattaagtttggagataaccccatcatccgcaagaacacttattattcccccaggagttgctcatactttttcccatctagaaaatgtttttaccttaaatagctactctctttttttacctactatcgagcaattagcaagtgaaacattaaactggtcacctaataatgatgtgataaatttgccggaagatatcgatattaatgagattgaaggctatgagccgatgacagaagaagcttcggcgctggtctactatcgagttgctgagatacaacagcagtggttaagccaacatcgatttttacactctgaaactcgtaaaattcgcttagataatggcgatgaaattaatgtaaggttgcgagagaaaattgccgatgttcaaaaacaatcattacctacatccactattttaggtgtcgaatttcgtgaaatggcgaccctgcatacgggcaaagagagtggcattgttccattaacgcgacaatcccctatgtatctagtcgaacatggtcaggaggcttatgatttcgactcttatggattacatttagggcaagaagatcatttaacttttttaggaaattcctcgggtaaaatcactattaagctggtggatatgcgtgaagattcgcctacgctattttatgaagatgaaatggtttttgatccggcacccaatattgaattagtgatcccctgtggtgttgcccatgccttatttaatatggcgaatatcattactgtgaatcgacctgttatctatttggacgaagaaaaagaatatattccgggtcatgatgtgattgattggaaaatcgctaataaaaattatcaagcttatcgtgttaataaaatagcagcagatttaacctattatcaatttcttgtttctaaacaacaagcgttaatgaaacataagcccacccatcataccccaaaatcgattattgtttatgatgaaaataatcagcctattaaagtattaattaaagaaaaggtgtaacatctattatgcgtattgtctttttctatatgctttttttggtattaagtgcagatggtctaatggtttttttgacacctgttattgtttatcaattaacaacaagcattgaatatgcgggattgacatacgctttatggtggttaccacgtatttttttaataccgcttattggtcaatatattgatggtctaggtgtccgtcctgtttctgttatttccgatagctgtaaaattatcggttgtttatttttattaatagtagatttttcctctgatttagttattgcaattagttttggattagtgggtagcttaatttctattggtaattcacagacactgatttcatatgaaaaaattattgccttgatgagtcgccataaagaatatcatattaatataatgtctcgaatggattttttgggcatgatcattggcccattaatcggtatgttatttattgattatggttaccattatttactgattattccctgtctattttatttcattaacgccgtgttctttttgttcttttacttagtgccaaaacagcgccaatctgccactcagttacatagactaacagagacattacaggtgacgaaaaggatagtggtgatttttacgtctcctattttggttttttctattttaattgctatcggcaataatatgtttgatggattaattgagtcgagtggggcggcgttgatcgaccaatcgatgaatttacccattaaatattatggctttattgatatttctgcggggatctgtggcgtgataggaacttatttatatggttatctaacccattatttaaatcgaaaattattaatgtctctatcaatttgtatcattacaataagttcttttctattggttatttttcaacatgatatcacggcttttattctcttttatgccctatccattattggtaaggttttttcagggaatattttacggatgttaagaatagaaattattcctgtgacacaattagccagcatttcctcactgattatattgtttaatcaactgattttgcctattgttgggggattgctctttttctctacagggaatatttcgacagtatatatattgatgataatcgctatggcgatcaccttggtgagtggcgtaatgcttattatgcggttaaaccataaaaaagagataatcataaaataagcccacatttgaagtgggcttattttggctaagcaaccaatggattacttagcaacgctaattctaatgacacagaattatttttttgcgcgttcaaaagaagacagaatttcagctttagccgcttctacgccttcccaaccatcaacttttacccatttaccagattctaaatctttgtaatgttcgaagaagtgtttgatttgagcttttaataattcaggtagatcgttcacatctttaatgtgatcgtattctttacttagtttggtgtgtggtactgcaaccagttttgcatcttcacctgattcatcagtcattttcagtacgccaacaggacggcaacgaatgactgaacctggttgtaatgggtatggagttggaaccagaacgtctactggatcaccatctaaagataatgtgttgttgatgtaaccgtagttgcatgggtagaacatcgctgttgacataaaacggtcaacgaacagtgcaccactttctttatcaacttcgtatttgattggatcagcattggctggaatttcaataacaacatagatatcttctggtagttctttaccagcaggaacatgattcaggctcataaaaaatttcctatgaaaaattaatttgacgtggctcgtagtatagcgaaaagtttttaacaatacccgttttttgccgtacaggttgccttttgaggtaaaaataagcaacaaatacacgaattagctattttgggagatgaaaaaaccggacgcgttaattaagcccggtttaactatatcctgacaaaaagaaaatttattcttcgtctggatattgagccataaatgcttctgcttgttcgaccatcgctttagtacccacaaagaatggcatgcgttggtgcaactctgttggtttgatatctaaaatacgatctttaccattactggctttaccacccgcttgttccgcgaggaatgccattggattgcattcataaagtaagcgtaatttaccatttggatgacttgccgtacttgggtaaatataaatcccccctttgagcaagttacgatggaaatccgcaaccaaagagccaatatagcgagttgtataaggacggttagtcgttgcatcctgctcttggcaatacttgatgtatttttttacccctaatgggaatttaatgtagttaccttcattgattgaatacatatttccggtaggcggaaaatgaacactttcgtgagataaacagaaaacccctaaagaaggatcgtaagtaaaggcatgtacaccacaaccggtagtgtaaaccaacatagtagatgagccataaacgacataacccgcagcaacttggcgattaccgggttgcaggaaatcatctagtgtcactggttggccaataggcgtaatacggtggtaaatagagaaaatagtaccaacggaaacgtttacatcgatattagaagaaccatccaatggatccattaataccacatacttggcattttccgcacgatcaccttcaaagataacgatatcgtcttcttcttccgaaccgatccccgcaacttcaccacgagctttaagtgctgcttttagtttctcattcgcgtaaagatccagtttcatctgggcttcaccttgaacattagaaacaccgttagtgccaagaatatcgactaacccagctttattaatatcacggtgaataattttagccccaagcttaatggctgacagtaatgccgttaattcgccagttgcatggggaaaatcttgttgtttctcgacgataaattcgcctaatgttttcatgacgtgggtcctgaatgtgaatggataaaatataaaaaggaaaaaagtttccttattagtggcaagtttatccaaagaatcgcatgattcaaaggttaatccgtttctaatctgctttttgatggttagaatagtgaccaacttcatgctattggaaagaaattcatgcacattcatattcttggtatttgtggcacctttatgggaagtcttgccatcttagctcgagcgaaagggcataaagtaactggctctgatgcaaatgtttatcctccaatgagcacattattggaaaatcaaggcattgagctaatcgaaggttatgatccacaacaattagaacctgctcctgacatggtgattattggcaatgcgatgactcgagggaatccttgtgttgaagcggtacttgaaaaaggattgccttacacatcagggccacaatggttacatgactatattttgcctgagcgttgggttttggccgttgcgggtacccatggtaaaacgactacggcaggtatgctggcttggattttagaagattgtggttatcaacctggttttttaattggtggtgtgccgggtaactttcaagtttcagcacaattgggggaaagcccgttttttgttattgaagctgatgagtatgacagtgctttctttgataaacgttctaaatttgttcattactcgccacgtacgcttatcttaaataatctggaattcgatcatgcagatatttttgatgatctaacggcgattcaaaaacagtttcatcatttagtccgtattgtgccgggcagtggcaaaattatcatgcctgataacgatctgaacttaaaacagaccattggtatgggatgttggagtgaggaagagtacaccggtgagacgggtgattggcaggcgaaaaagatcagtaatgacagtagccactttgcagtgttccataaaggtgagcaagtcggtgaggtttgttggggactttcgggtgaacacaatatgcaaaatggcttaatggccattgtggcagctcaccacgttggtgtattaccggtagatgcatgcgcagcactcaataaatttattaacgcccgtcgtcgtttagagttacggggtgaagtaaatcaagtgagtgtttatgatgactttgcccatcatcctacggcgattttagcaacccttgaagcgctacgtagtaaagttggcggaacagcacgtattattgcggtattagaacctcgctctaatacgatgaagatggggatcagtaaagatgatatcgccccggcattgggacgtgctgatgaagttttcttatttcagccacctaacattcaatggttagtcagtgatattgctgagaagtgtgtacagcctgctcgttggagcacggatattgatacattagtggagatggttgctaaagaagctaaaccgggtgatcatattttgatcatgagcaatggtggctttggtggtatacatgaaaaactcctggcgaaattagccacaccaaaatcatctgtggatcaatattaatttaaataagtaagccactgaaatttcagtggcttactgtttatgacctattttcctgaagtcgctatttataattcctgatcaaataggtttaaaatcgcatctcgtagttcttctgttgagaatcctggcgcgggtgtagaaaaaatagtgtcatcaccagcgatacttccgaggatcccttctgctttacctaaagaatctaataaacgtgcaataagctgtgcggcaccggggctggttctaataaccactactgagtggttatggtcaatatcaagtaccaaatttttcaatgggctacttgctgttggtacaccaagttctgttggcaggcagtaaaccatctccattttggcattacgcgttcttactgcgccaaattttgttagcatacgagagattttagactggttaatattatcaaaaccagcttcttgtaatgcagttacaatctcgccttgtgaactgaatttttcttctttcagcagggctttaaatgctttaaccaagtcttcttgcttagaaggagtgcgcatagttcacctttagtgagttatcaataactcgcacattatgcagagaagtgaatttttatgcaacattagctccgttaatcttgtttctcttcttggttgatgtgtgtttttgtgtgttaactcaaaaaagttttatttctcgatattgaatgcgataatcttgattaggtaaataatttgttaactaaatgataatcttaaatgattatgcaatatgagatagcgcgtttagctcttagtgatatttattggaattatttctcaaaagagtgcccgctatctcattaacagataagcaatttgtttagaataaccgaagtattattttttactacaaatgccttattatgcaatatagctgttaaataattgttttctttactaggtgtgttgcgtaatagtgagtatatcaaaggcgttccactatctcgtaaactaaggagtatcagaatgaaagtagcagttctcggtgcagcgggtggtattggtcaggcactggcacttcttcttaaaaatcagcttccagctggtagtgaactctctttatatgatatcgctccggttacaccgggtgttgcagcggacttaagtcatatacctactcaagtaagggtaaaaggttttgctggcgaagatccttctcctgcattaaaagatgcagatgttgttttaatttctgccggtgttgcccgtaaaccgggtatggatcgctctgatcttttcaatgtaaatgcagggatcgtgcgtaatcttattgaaaaagttgcacaaaactgccctaaggcgcttattggtatcattactaatccagtcaatactacggttgctatcgctgctgaagtactgaaaaaagccggtgtttatgataaaaaacgcctatttggtgtgacaacactggatattatccgtgcgaatacttttgttgctgaattaaaaggcaaagatccacaaacaacgaatgttccggtcattggtggacactcaggtgtcactattcttcctttgctatctcaagtagccggtgtgtcatttactgatgaagaagttgctgcattaacaaaacgtattcaaaatgcggggactgaggttgttgaagctaaagcgggtggcggatcagccacattatcaatgggacaagcagctgcgcgctttggtctttcattgatccgtgctttaaatggcgaaaaagatgttattgagtgcacctataccgaaggcgatggtgaacatgcccgtttctttgcacaacctgttcgtttaggtaagaatggtgttgaagaatatctaccaatcggtcaattaagtgattttgaaaaacaatctcttaatggcatgttggatgtattgaaaaaagatataattcttggcgaagaatttattaataaataaaaaataacttttttgctttaaaataatgtaaatttaaataaaaaccgctgatagtgtatcagcggttttttttattaattataatatatgtaattattagttaattattggttttgtcgcgtatcttccgttcaagtaattctcctgtttcaggatgaaaataacgactgggccaaatttccgaaggcgctacacctagaaagtcagcaatgattttctcaccttttggccaagggcgtgacagtgcattagccagtgttgaagagcttaaaccagcttggcgagagatggctgccagtgttgtgcctcgttttctgagtgcggcaataatatcggcaggatgccaatcagatttccttgaaatcatttttaatcctttttctataaaattaaatgctgtgttagtggtataaataacagtttattagaaatgcttaaaagcattaaactgattatttagaaaataaaataacattatttttctaaaaatatttctgatttttttcttaataatttcttttttgaagttgataacaattttagagaaacgtaatgaaaaaagagtggtatacggcaatggaattgacgggtataggtggattacctaaatcaccacaaggtgtaaatgcaaaagctaaacgtgaatcttggttaaaacaaaagagaactaataaacaaggaaatggcgttgaatatcattactcttgtttaccagaagaaactttaattgctctggagctttatgaaccattagcacattacaaactaaataaagaggagccactcgttatctgggtgaaagcattccaacaacttaatgatggtgaacaaaaaacagtaacagagctgatcttgcgggatggtattagaagttttttagaaaagatcgtcaaagattaagcgactttaaagaacgcgctattgcgttatccgcaaccgatatctgactaacctcttagttgaatgtgagatgagatcatgaaaaaagaatggtatacagcaaaagaattagtagggcttgcagggttacctaattctccacaaggggtcaatttaatggcacgccgtgaaggatgggaaaatcgccgtaagcgtggagtacaaggtaaagccgttgagtactcggttaaaagcctccctgaagaggtggtgagtgtgttagcggcgcatgagcctcctgcagaatatttatctaagcgtcaggatgcctttcttatctgggtggaagcttattatcagctaacaaaatcagagcgtgaaaaaatcgtaaaatttgttttacgagaaggtctcgctaagttaattagctatattgatgctgacaatcaagaagagatcgaacgagaaaatgaagaagtggttcaaaaattaaaaagccccccagagtcgacatagtcgctctgacgggcttctcatactttatggggtttaggtatgaaaattacgattgtcgttgcacagcaacgtgcgcaaggccaattaatgcatctttgtaagatgaatcaggaataatcgctaacgcctcaatggctttatcggcttcttcttccgctttttggcgggtatattccagtgagccacactgtttcatcgtttttaacacagtgtcgagtaaatgacggccgttacctttttcaatggcttgacgaatgagttgtgattctgtttcgttaccatggtgcatggcatgaagtaaaggcaaagtaggtttaccttcatccagatcgtcaccggtatttttacctaattgggtattatctgcatcataatccagtaaatcgtcaatcagctggaatgcggtaccaagataacgaccataatcttggaaagctttctcttgctctggagtggctccgcagaggatggctgacgcatgagaggcagcttcaaataaacgggcggttttactgtagataacttgcatatagtcatcttcagtaatgtcaggatcgttacaattcattaattgtaatacttcaccttcagcgatcacattggttgcgctagacatcagctttagcacgcgcatggaatcaagatccgtcatcatctgaaaagatcgtgtataaataaagtcacctaccagcacgcttgcagcattaccaaacacagcattagctgtttgtttgcctctacgcatatcggattcatcaacaacatcgtcgtgcaataatgttgcggtatgaataaattcaattaaagcggcgacagagatatgtttgtccccttgataatccaaagctcggccggtcagaacagcgatcattgggcggatccttttaccaccaccgctaatgatgtagtaaccaagctggtttatcaaagaaacatctgaattaagctggtaaagaattgcgtcatttaccgcagccatatcagcggatgtgagttttataatagattctaaattcatgtttttcgactttggctcgccaatgagcgcgttataattaataaaaaatgatcatgccatagattttactctcttataatttagattgtactttaaaaatggctgaaataaatattgtgtaaaaaactcttttttttgctggttgtttgcgatctatacttgtcatcgcgactaaatttgcgtagaattcgcgccctatgtgaatattttaattgtgcactcaaattatacatattgggagtgtgcggaaagcggagtttatatgtacgcggttttccaaagtggtggtaaacaacaccgagtcagcgaaggtcaaacaattcgcttagaaaagcttgaagtagcaactggcgaaactattgagtttgacaccgtcatgatggtcgctgatggcgacaacattcaaattggcgctccaatccttgagggcgttaaagttaaagcggaagtggttgctcacggtcgcggcgagaaagttaaaattgttaagttccgtcgtcgtaaacacagccgtaaacaacagggccaccgtcagtggtttactgatgttaaaatcactggtatcgcttaaggtttaggagagcagattaatggcacacaaaaaggctggcggctcgactcgtaacggtcgcgattccgaagcaaaacgtctaggtgtaaaacgtttcggtggtgaagctgtattagcaggtagcatcatcgttcgtcaacgtggtactaagttccatgcaggtactaacgttggttgtggtcgtgaccacaccctgtttgcgttagctgacggaaaagttaaattcgaagttaaaggtccaaacaatcgtaaatttatcagcatcgaagctgaataattaccggtcctttaaacaccgagttaaaagccctgcacagtctgttgcggggctttttatatttaaaaaaggccatctctgggtaatttcggccatccagcacgttaatggctatcatacggagtaaaatcatgaaatttgttgatgaggccaagatcctaatcgtcgctggcgacggtggtaacggctgtgtaagctttcgtcgagaaaaatatatcccgaaagggggaccagacggtggtgatggcggtgatggtggtgatgtctacatggttgcagacgaaaacctcaacacccttatcgattaccgttttactaaatcttatcgcgctgagcgtggtgaaaatggccaaagccgtgattgtacgggaaaacgtggtcaagatattactattaatgtccctgtggggacgcgtgcccgtgatcttgctacaggtgagatcattgctgacttaacggtacatggtcaaaaacaaatggtcgctaaaggtggcttccatggtttagggaatacgcgttttaaatcatcagtcaatcgtgcaccacgtcaacgcacaatgggtacaccgggtgaatcacgtgaagtactgttagagctgatgctacttgcggatgtaggtatgttaggtatgccgaatgccggtaaatctacctttattcgagccgtctcggcagccaaaccaaaagtggcagattatccatttactacactagtacctagcttaggtgttgtgcgtatggacagccatcaaagctttgtcgttgcagatataccggggctgatcgaaggggctgctgatggcgcgggtcttgggatccagttcctgaaacatttagaacgttgccgtgtattattgcatttgatcgacatcgatcctattgatggttctgatcccgttgaaaatgccaaaatcattatttctgaattagaaaaatacagcgataaactggcacaaaaaccacgttggttagttttcaataaagtggatctgcttgatgccgatgaagcaaaacagaaagcacaagcgatagttgaagcgttgggttgggaaggtgattattatatgattgctgctatcaaccaagaaggggtgaaaaaactttgttgggatattatggaattcctgaaagtaaccccacgtgagcaagatattgctaccgctttagccgctgaagaaaaagttgattttatgtgggatgactaccataaagaacaacttgaaaatcctgaccttgaagacgatgacgaagattgggatgaagaagatgatgatggtgtagagtttatctaccaacgctaatctctctttttatcggtattgttgtctcggtatcgtatagacatacagatagcgagacataaaaaacgcctgaattttcaggcgtttttactttctaacaaataatagtgctatctattgttatagatatctttatataaattcgtttcaaaacgaaccaaataggcgcgtccagcattgcgattttgtgtaggcggagagtaggcagaaataaattgtacaaatgctactttctgtccattggctgtggtcataaagccagctagattatacactcccttgagtgaacctgttttagcggaaactttaccgttgacgcccgcttcagtaaaaccaccacgatattgcaatgtaccatcatgaccagcaagaggaagcatactgataaaatttaactcactatcatgttgtccgacatattgtaatacttgcatcatggttgcgggggctatcaggttatggcgggaaagcccagatccatccaccataattgtattagctaaatcaatgcccgctttttgttttaaaatagcacgagtggcatccgcccctgaacgccaagtgccagcaacaccataatattcacgaccaatagttctaaatacggcatctgcaatcatattgtcagactcttttaacatcgtcgtcaataaagtgtgtaacggtttagattgtgtttgtgctaaaacagtaacagaggctttaggttgggagcggcgtttgacataaccgtccagctcaatatctgcacgttgtaactcttcttttagcaatatacctgcccagtgcgcaccatcttgaatggaaaacatcagcggcatggcttcttcacgtttaggaatgcagcctgttatcacataagtatttaaatctctcaccgtgacgtctaattcgcaaaagcgggttcgtgttgagcctttttcataggtttcaacttcgcttaaaaccgtgacaggataaaaagacgctttacgtatggtggcgatatcaccttctttttgaccactttgcagtaagacggaaaaacaatttttatctacaatagcggcacttggtggggcactaaagcattgggtcatatcattccaaacccatcccggcgctttgtcatggctggagaaagcagaggtatcaattaataaatttcccgttatttttgtgacgccggattgttttaatacggcaaccattgctcgtaattgctggcgagttagcgtaggatcaccactaaaacggaaaattaaatcaccctctagttgattgttttttatcttaccttccgtttccattgtggtggtaaattgataatcgccccctaattgcaatagggcggctaaagctgtgaccactttttgtgtgctggctggcaaagataattgattatcattataagttaggttaggggaggatgcgccaacagtttgggtgattaaaccgacttgagtgccatcaggcaaaagttctatatatttttcaacaggaatggcgagggttgaaaagcttaacagactcaaggtataaaatattccgcggaatataggtaataagcgcataatttctctatccgtaactataagcttaacgctatagtgttgattgccagaggctaatactaaagggcaatgagggcaaaagtaaacggtaacacgtgtgattatctgattatcagaaaatattacttatcctgtttttaaaacgagaataagacgtgaagccattggcctcttgtgttagatttagtttagctttagataagggaggtttttactacttcccaaccaaaagggtagaaagttacaattattttctattcatcgaatatataaagggacaggccctcattaaggctgcctgtgtctttttttgtcttgagaagagtaaagtagaaccttttctctgtgttgttagtataaaaaatcaggatgatacctattttttattaggaatagtattgaggtattaacacatgaatcagatccctatgacagttctcggagcagaaaaattacgcgaagaactggaatatctaaaaagtgttcgtcgcccagaaattaccgcggccattgctgaggcacgggaacatggcgacttaaaagaaaacgcggaatatcacgcagctcgtgaacaacagggtttctgtgaaggccgcattcaagaaattgaagcaaaattatcaaatgcgcaagtcattgatatcactaaaatgacaaataatggacgtattatttttggtgccacggtgacgttactcaatgtggatactgaagaagagcaaaaataccgcattgttggtgatgatgaagcaaacattaaagaaaacttaatttcagtcaactcaccgattgcccgtggattgattggtaaagagttagatgatgtggtggtcattaacaccccaggcggccaagtagagtatgaagttttaaacgtagaatatatttaatttgtaattttacgtttctatagaaaactagaatgctatcctgtggtaatattaaaaaaggcctgaaaaggccttttttgccatagagttagttatggcatttttatataaaggtataagttttatttcggtaaaataattttacgcgcttcagaagggcgataaagaacaaccatttttccgataacttgtacattctgtgcaccgctttcacgtacaatcgctgccacgatcaagtttttaacatctcgatcttcgcctgcgattttgactttgataagctcatgatgtgccagagcgatttcaatttctgcaagaacgccttcagtcaacccgttgttaccgatcataacgacaggattgagatgatgagcgagccctttcaggtgttgaatttgttttttgttaagagtcatcattaatttttgcttagttgggattgaaaacggtctattctaacgccatctctcatttatcaccataaaatgtcgtcaagatgcggtaaaatgagtgaagaagtaaaatttttgattgctaagtgtatgatagttggaaaacgcaatggccaataaaaaacgttcggcaagctctagccgctggttacaagaacattttagtgataaatatgttcaacaagcaaagaaaaaagggtttcgctctcgagcttggtttaaattggaagaaattcagcaaagtgataacattttcaaaccaggtatgaccgttgtcgatttaggtgctgctccgggtgggtggtctcaatatgtcgtacagcagttaggaaataaaggtaggatcatcgcatgtgaccttttacctatggatcctatcgttggtgtcgatttccttcaaggcgattttcgtgatgaacttgtattgaaggcattgcttgatagagtaggtgataataaagtccaggttgtcatgtctgacatggctccaaacatgagcggaacacccgcggtcgatattcctcgatccatgtatttagtagagttagcgcttgatatgtgtcgtgatgtgctggctcccgggggaagttttattgtcaaagtgtttcagggagaaggctttgatgagtacctggggcaaatacgctccctgtttacgaaagtgaaagttcgtaaaccagacgcttcgcggtctcgttctcgtgaggtatatattgtagccacagggcgtaaactttagtaccctaaagctatttgttaacacagttgtaatatgaggttaatcccttgagtgacatggcgaaaaacctgatcctctggttagtcattgcagtcgtattgatgtcattattccagagcttcggacccagcgattcgaatagtcgtaaggtggattactctacctttatcaatgagttaactaataaccagttacgcgaggtcagcataagtggttatgatattaatgtaactaaaacagataactcaaagtacagcacgtatatgcctatgcgtgatgataacctgctgaccactttaatgaaccgtaatgtaaaagtgaccggtgaacccattgaaggtcaaagccttctaacacaaatttttgtgtcttggttcccaatgcttttactgattggtctttggatcttctttatgcgccaaatgcaaggtggtggcggtaaaggtgcgatgtcttttggtaagagtaaggctcgcatgttgacagaagaccaaatcaaaacaacctttgctgatgttgcaggttgtgatgaggccaaagaagaagtcagcgagctagttgagtatttacgtgatccgggtcgtttccagaaattaggtggtaaaattccgaaaggtatcctaatggttggtcctccgggtacgggtaaaacattattagcaaaagcgattgctggtgaagcaaaagtacctttctttactatttctggttctgacttcgttgaaatgtttgtcggggttggtgcttctcgtgttcgtgatatgtttgaacaggctaaaaaagcagcaccttgtatcatctttatcgatgaaatcgatgcggttggtcgtcaacgtggtgccggtcttggcggtggtcatgatgaacgtgaacaaacgctgaaccagatgctggtcgaaatggatggttttgaaggcaacgaaggtatcatcgtgattgccgcaactaaccgccctgacgtattagaccctgcattattacgtccaggtcgttttgaccgtcaagtcgtcgtaggtttaccagatgttcgtggtcgtgagcaaattctgaaagtgcatatgcgccgagtgccattatcaccagacgttgatcctgcgatccttgctcgtggtactccgggtttctccggtgctgacttggcaaacttggttaatgaagctgcactatttgctgcacgcggtaacaaacgtgttgtttcaatggtcgagttcgaaaaagcaaaagataagatcatgatgggtgctgaacgccgttcaatggttatgaccgaagaacaaaaagcatcaacggcttatcatgaagcgggacacgccattattggtcgtttagtgcctgaacatgatccggtacataaagtgacgattatcccgcgtggacgtgcattaggtgtgactttcttcttacctgaaggtgaccaaatcagtgccagccgtcaaaaactggaaagccaaatttcaacactttatggtggccgtttagcggaagagatcatttatgggcctgaacatgtttcgacaggggcttctaatgatatcaaagtggcaaccaatattgcacgtaacatggtgacacagtggggcttctctgaaaaattagggccattactgtatgctgatgaagacggtgaggtgttcttaggtcgttcagttgctaaagcgcaacatatgtcagatgaaacggcacgtactatcgacgaagaaattaaagctatcatcgatcgtaactatacccgtgctcgtcaaatcctgatggacaacctagatattctgcactcaatgaaagatgcattaatgacttatgaaaccattgatgcacctcaaattgatgacttaatgaatcgtcgtgaagttcgtccaccggcaggttgggaaggcaataatggcaatagtggtgcaaataccgctacagcacagccgacacaaacacatgtgacgaatgagccaaataataagtcaggatcagagagtgacacaccttctgataacaatactcattaatccttatcgggttctatattgagtaagctataaatacaaaccccaggctttctggggtttttttatataggtatcaacgaaatgaaattaattgccagaggaagagagcttaatttatcttcaccccaagtgatgggcattttaaatgtgacgccagattcattttctgatggcggaacgcataactctcttaatgatgctattaaccacgccgctaaacttattgctgaaggggcttctatcatcgatatcggtggtgaatcaacaaggccgggtgccagtgatgtttctgtcgatgaagaattacatcgtgttattcctgtggtcgaagctatccagcaacgttttgatgtgtggatttctgttgatacatccaaagcacaagtgatcacggagtccgctcaagcgggtgcctctattatcaatgatatacgttcacttaccgaacctggagcacttcaggcggctgcaaaaacggggttacctgtttgtattatgcatatgcaaggtttacctaaaacaatgcaacattcgccgcagtataagaatgtgatgatagaagttgatgcttttctggcagagaatattcaacgttgtattgatgctggtatcgagaaaaatcaaattattcttgatccaggcttcggctttggtaaaaatttagcgcataattatcaattattagcacatctaagtgattttcatcactttggtttaccgatactcgccggaatgtcacgtaaatcaatggtagggcagttactcaatgttccgccacaagagcgtgttgctggtagtgttgcttgcgcagttattgctgcaatgcaaggggcacaaattattcgtgtacacgatgttaaagagactgtagatgcgatgaaagtcgtgcaggcgactctttctgcaaaggaaaataatgaatgagcgaacgtaaatactttggaacagacggtatccgtggaaaagtaggtgacagccctattacacctgattttgtattaaagctaggctgggctgcaggtaaagtacttgcacgtcacggctcacgtaaaatcattatcggtaaagatactcgtatttctggttatatgttggaatcggctctagaagcaggccttgcagctgcgggattatccgcttcatttacaggcccgatgccaacccccgcggtcgcttatttaacccgtactttcagagcagaagctggcatagtgatttctgcttctcataatccctattatgataatggcatcaaattcttctccattgatggtacaaaactacctgatgaagtagaagaagctattgaagcggaaatggaaaaaccgatcacttgtgtagagtccgcagaattagggcgtgcgaatcgcattgttgatgccgcaggccgttatattgaattttgtaaaggtacgttccctaacgaaaataatttaaatgggttaaaagttgttgtggattgtgcccatggtgcaacttaccatattgcgcctaatgtttttcgtgaactcggggctgaggttatcactattggttgtgagcctacgggcatcaatatcaatgacgaatgtggtgcaacagatgtacgtatgttgcaaaaacgcgtgttagaagagggtgccgacgttggtttagcctttgatggtgatggtgaccgtattattatggttgatcataaaggcctaaaagtagatggtgaccaaattctctatatcattgcgcgagaagcattgcgtcaaggtcaactacgtggtggtgccgtcggtacactaatgagtaatatggggttagagattgccttaaaacagcttggtattccttttgtgagagccaaagtgggtgaccgctatgtacttgagaaattgcaagaaaaaggctggcgtttaggggcggaaaactcggggcatattattttacttgataagacaacaacgggtgatggtattgttgctggtctgcaagtattaagcgcaatggttcgtaaccatatgagcttgcatgatctatgcagtggcatgaaattattaccacaaattttggtgaatgttcgttttacgggaaatcacgatcctctacaatccacagaagttcagcaagtcgcaaaagaagtcgaggcggagcttggtggtaagggacgcgttttattacgtaaatcaggaacagaaccattaattcgagtgatggttgaaggcgaaaatgaagagcaagtcacagcgatggcgaatcgtattgctgatgcagtaaaacatgttggctaattgctgtttttttcttcaattaatcactttatagtaaaataaccttgcttgtcagttcaggtttggttagtattcacacccgcttagtaaggtcgttgaactaaagcgggtgaagcaatcgaaggttatcgcataggcgataagttccatagaataggtaacgcaaatgtatacagcactcattgttattcttatcattgcagcaacagggctggttggtctgatcctgttacagcagggtaaaggtgctgatatgggcgcttcttttggtgcaggtgcttccggtacagtatttggttcaagcggttcagcaaatttcatgacccgtatgaccgctgttttagcaacagtgtttattgtactttgccttattttaggtaatttaagtgccaataaaactgttcgtgaagacagtaagtggatgtctatcgagcagactgcagaagaagcgaaaaaagctgagcaattagcagcgcctgtagcaccagcaaacacagatattccgcagtaaactaagtaatagttaaaaatgagattgtttggggttttggttaaataaacagtctcattaaagtgccgaggtggtgaaattggtatacacgctaccttgaggtggtagtgcctacaaaacgggcgtacgggttcaagtcccgttctcggcaccattattccagatagcttgcgttttgcttgttatcagcgtaaaatttgccacgtttttcgaacgcggggtggagcagcttggtagctcgtcgggctcataacccgaaggtcgttggttcaaatccagcccccgcaaccacttctaacaatacagcacttttctcattaatcatcttgtaaaccgattatgatcctgagtggaatgtgccgtagaagaggttatctcgattggcaagttacagggtccagttgcataaagccccgaatttcggggttttttgttatcagagaatagaatactgggctataagccctttttttatgccttgggggtgggtttgtccacattagagcaaaaattaacagcgatggtttcagcaccagtagaagcattaggctttgaatttgttggtcttgagtttattcgtggtcgagtatcaacattgcgtatctatattgatagtgaagaaggtatcactgttgatgattgtgctgatgttagccaccaggtcagtgctgtgctggatgttgaagatccaattcaaacattttataaccttgagatctcatctcctggtttagaaagacctttattcactacaacgcattatgagcaatttatcggcgaagaagtcgccgttgtattacgaattgcgatgcaaaaccgccgtaaatggcagggcattattaagtctgtcgctggcgaaatgatcacggttactgtggatggtaaagacgaagtgttcgcactgagcaacatccagaaagctaacctggtaccccacttttaagttttgaagaggcaactaggatgaacaaagagattctggctgttgtggaagcggtctctaacgaaaaatctcttcctcgtgagaagattttcgaagcactggaaactgcattagcgacagcgactaagaaaaaatatgagcaagagattgatgtacgagtttgcattgatcgtaaaacgggggattttgatactttccgtcgttggcttgtggttgaagaagttactcagcctactcgtgaaatcacacttgaagcggctaaatacgaagagcctgaaattgaactaggcggcttcattgaagaccaaattgagtctgttactttcgaccgtattaccacccagaccgcaaaacaagtgatcgtacaaaaagtacgtgaagctgaaagagcgatggttgttgatcaattccgcgaacaattaggcgaaattatcacgggcgttgtgaaaaaagtaaaccgcgataacatcaccctagatttaggaaataacgcagaagccgttatcttacgtgaagatatgctaccgcgtgaaaatttccgcccaggtgaccgtgtacgtggtgtcttatacgatgttcgtacagaaactcgtggtgcacaacttttcgtaacacgttctcgtcctgaaatgctgatcgaattattccgcattgaagtacctgaaattggcgaagagatcattgagattaaagctgcagcacgtgatccaggttctcgtgccaaaatcgctgtaaaaaccaacgataaacgcatcgaccctgtgggtgcttgtgttggtatgcgtggtgcacgtgtacaagccgtttccagtgaactgggcggtgaacgaattgatattgttctgtgggatgataatcctgcacaattcgtgattaatgcaatggctccggcagatgttgcttctattgttgtcgatgaagacaaatgtacaatggacgtcgctgttgaaagcagtaatcttgcccaagcgattggccgtaatggtcaaaatgttcgcttagcagcacaattactgaaaaaacatcgtggtgatgacaaatgggaactgaatgtcatgactgcagatgaactgaatgctaagcatcaggcagaagcaaacgcagccattgaaatatttactaagcatctcgacattgatgaagacttcgcaactgttttagttgaagaaggtttctctacccttgaagagttagtttatgtgccgattgacgaactgttagctatcgacagtcttgatgaagaaacagttgaagcattacgtgaaagagcaaaagcggcattaacaacgattgaactagctcaaaaagaaagcctaggcgataaccagccagctgaggacttattagctctcgaaggcatggaacgttctttagcatttgatctagctgcccgtggtatctgcacactggaagatcttgccgaacagggtatcgacgacctaactgatattgacggtttaaatagtgagcgcgcaggcgaactcattatggctgctcgtaatatctgctggtttgggaatgatgcgtaacaactgagcaggaaggaacagaatgacagatgaaacagtaaaatcacttgcagaagagattcagacaccggttgaacgtttggtacagcagtttgctgatgccggtattaagaaaaccgtctctgattctgtctcccaaaaagagaaagaaaccttgctggcttggttgaaccgtgataaagagtcaaccagccaaccagaaaaattaacgttacagcgcaaagtgcgtagtacgttaagtgttcctggtacaggtggcaaaaataaatcagtagccatcgaagtccgcaaaaaacgcacttatgtgaaccgtgatgcagttgaaaaagcacaagcggcagagcaagctcagcgtgaagcggaagaaaaggcgcgtcgcgaagcagaagaaaaagcacagcgcgaagcacaagagaaagcacagcgcgaagctgaagaaaaagcaaaacgtgaagctgaagaagccaagaaaaaggctgaagaaaaggcaaaacgtgaagctgaagaagcaaaacgtgaagcagcggaattagctaagcgcgaagcagcggaaaaagacaaagtgaaacaaaacgagaaaccaaaagctgataaggctgatcaggaaaaagcacgtcgcatagccgaacaggctgaactgaaacgtaaaacagaagaagctcagcgtcgtaaagctgaagaagaagctcgcattgcagcagaaaaagcgcgtcgcttagcggaagaaaatgctgaaaaatggacttcagatacgtcatctgaaacagaaggtactgactatcatgtgacgacatctcgctatgcgcgtgatgcagaagatgaaagtgatgctgaggttgaaggtggccgtggccgtggtcgtgcagcaaaagcccctcgtccaaagaaaaataaccgtcactctgaaaaagcagatcgtgaagaagctcgcgctgctggccgttctaacaagaaaggcaaaggacgtaaaaacagcacattacagcaaggcttcaataagccagcagctgctgtaaaccgcgatgttgtcattggtgagactatttcagttgctgatttagcaaacaaaatggcagtgaaaggttctgaagtcattaaaacaatgatgaaaatgggtgcaatggcaaccatcaatcaagttttagaccaagaaacggcacaactggttgcggaagaaatgggtcacaaagttatcttacgtcgtgaaaacgagttagaagaacaagtgatgaacgaccgtgatactagcgatgaaatggctgtatctcgtgcgcctgtggtgactattatgggtcacgttgaccatggtaaaacctctttactcgactacattcgttcaacgaaagtggcttcaggtgaagcaggtggtattactcagcatatcggtgcttatcacgttaaaaccgacaaaggtgaaattaccttcctagatactccaggtcacgccgcatttacttcaatgcgtgcccgtggtgctcaggtaacggatatcgttgttctggttgttgctgctgatgatggtgtgatgccacaaactatcgaagctatccaacacgccaaagcagcaaatgtgcctgttgttgttgccgtgaacaaaattgataaaccagaagctgatcctgatcgtgttaaaactgagctgtctcaatatggcattctgccagaagattggggtggtgagactcagtttatccatgtgtcagcaaaacaaggcttaggtattgacgagttgctggatgctatcttattacaagcggaagttcttgaactgaaagcagtaaaagaaggtatggcaagcggtgttgttatcgaatcttacctcgataaaggccgtggtcctgttgcgactatccttgttcgtgaaggtactttgaataaaggtgatatcgttctgtgtggctttgaatacggtcgtattcgtgcaatgcgtaacgaattaggtaaagaagtacaatctgccggcccatcaatgcctgttgagattttaggtctgtctaatgtaccttctgcgggtgatgaagcaaccgttgttcgtgatgagaaaaaagcgcgtgaagttgccttatatcgtcaaggtaaattccgtgaagtgaaactggctcgtcaacagaaatctaaactggaaaacatgtttgctaacatggaagaaggtaaagtttctgaactgaacatcgtactgaaaacggatgttcaaggaacttgtgaagccatcactgatgcattagttaaactttctacagatgaagttaaactgaaaattatcggttctggcgtgggtggtatcactgaaacagatgcgactttagcggctgcttctgatgctatcattcttggtttcaacgttcgtgctgatgcttctgctcgtcgtattatcgaacaagaaagtgttgatttacgttactactccgttatctatagcttgattgatgaaattaaatcagcaatgagcggtatgttagagcctgaatacaaacaagaaatcatgggtcttgctgaggttcgtgatgtgtttaaatcacctaaattcggcgctatcgcgggttgtatggtggttgaaggtaatatcaaacgtaacaatcctattcgcgtattacgtgataacgtggttatttacgaaggtgagcttgaatcactgcgtcgctttaaagatgacgtcaacgaagtccgtaatggtatggaatgtggtatcggtgtgaaaaactacaacgatgtccgtgttggcgatatgattgaagtgttccaagttatcgaaattaaacgttctatcgattaatcgagtacgtctgatttaaaaaggaagggagcttaatggctcccttcttattcctctctttatgctattccccctttattcttttctgtatttttcaatataagcgaaatagattggctttcagtaatttatgtcattaaaagaacagggtaagataacgctaaagagcagatttattgctaaagagaaaaaaagcgtaaagcggttgtgaaacgtgactttatgtatactctttagatatcatcgattttaaaattggatcaataatgacaatagagtgataacgacattgtcagggagagataaaatggcaagagattttagccgtgctcagcgtgtttctcaggaaatgcaaaaagaaatcgccatcattttacagcgcgaagtaaaagatccacgtattggaatggccaccgtatccggtgttgaaatttcacgtgatctggcttacgccaaagtatttgtcacctttttaaacctatcagcaggtgaagaaagcgatgaagaaatggtagaaaatggcttaaaagcccttaacgaagcagcaggctttattcgctctttattaggtaaagcgatgcgcttacgtgttgttcctgagctaacatttgcttatgacaattcattagttgaaggtatgcgtatgtctaaccttgtgtcaaatgttgtcaaagatgatgaaaaacgccgtcataaagaggaagagtaatggggcgtcgtcgtaaagggcgtgagattaacggcgtattattgcttgataagcctcaagatatttcatcgaatgacgctttgcaaaaagtacgccgcatgtttaatgcaagtaaagcggggcataccggcgctttagatcctttagcgacaggtatgcttcctatctgtttaggtgaagcgacaaagttttcacagtttttattggattcagataaacgctatcgagtgattgccaaattaggtgaaagaacagatacctctgatgctcatggacaagtgatccagcaacgacctgtacagtttaaccagcaagcgctcgatgctgcgttagagagttttcgtggtgaaacattgcaaattccttcaatgtattcagcccttaagcatcaaggtaaaccactttatgaatatgcaagacaaggtattgaagttgagcgagaagcaagacccattaccgtgtatgaattgcaatttattcgctgggaagacgatgaattagaactagaaattcattgttctaaaggtacttatattcgcactatcattgatgatctgggtgagaaattaaactgtggtgcccatgtgattttcttacgtcgtttagaagtcgcagattatccgaaagagcgtatggtgacgcttgagcaattgcgcgcaatcattgatgatgctcagcaacaagatgagtcaccatttcctgtgttagatgccttattattgcctatggatactgcggttgcacatttccctgtggtgcatttaaccgccattatggcgggttacttaaaactggggcaaccggttcgggtaaatcacaccttggatgaaggggaatgggtcagagtcaccgaaggcgatgagaaaaaatttattggccttgcgatcatcaaagatggtctagttgcaccgaaaagattagtcgtggattatcacgcactcaataaccctgaatagcaattcttgcgctaagtgtgtttgaagcgtagaataatgcggctatctgtttaggtggctgagttggatagctgaattagagattggctatctgaaaattttacttttattggagttttattatgtctctaagtactgaagcgaaagcaaagatcgttgctgaattcggtcgtgatgctaacgatactggctcaagcgaagttcagatcgcactgctgactgcagaaatcaaccacctgcaaggtcacttttcagagcacaaaaaagatcaccacagccgtcgtggtctgctgcgtaaagtttccagccgtcgtaatctgctggactacctgaaacgtaaagatgtagctcgttatactgcactgattgaacgtttaggtctgcgtcgctaatcaagtgagtttcagtgaaaaggggcccgtaggccccttttctactagaaagtgctatttttaagaaagtgctatttcaaaaatgagtcgttatgttttaatgtggtgatggttatttagtctctctagttgcgacaattcgcgcggctaatgaaagtgtttaaacgtggttaagttaaatatttccattagtcgcgaggggacgtagcggagaaaagattattcatcgtcgctaaatatcatgcgacaataagataaaggatattattttgctgaatcctacagttcgtaaatttcaatacggtcaacataccgttacgttagaaacgggcatgatggctcgccaagcaacggctgctgtaatggttgacatggacggcactgctgtttttgttaccgttgttgctaagaaaaaagtgaaagaaggacaagacttcttcccactcaccgttaactatcaagagcgttcatacgcagctggccgtattccaggaagtttcttccgtcgtgaaggtcgtcctggcgaaggtgaaactttaatcgcgcgtcttattgaccgccctttacgcccactattcccagaagggttcttaaacgaaatccaagtagttgcgactgtggtttctgttaatccacaagttaacccagatatcgttgctatgattggtgcttctgcagcactgtcattatcaggtgtacctttcaatggtcctatcggtggtgctcgtgttggctttattgatggtcaatatgtactgaacccaaccgttgatgaactgaaaattagtaaattagacttagtggttgcaggtactgcgggtgcggtactgatggttgaatcagaagctgatttattatcagaagaacaaatgttaggtgcagtggtatttggtcatgaacaacaacaagttgtgattgaaaatatcaatgcattagttgccgaagtcggtaaagaaaaatgggattgggcaccagagcctattaaccaatctttacatgatcgtattgctcaattagcacaaactcgtattggtgatgcgtatcgtattactgaaaaacaagagcgttatgagcaaatcgatgctattcgtgatgaagtgatcagcacattattagcagaagatgagtctttagacgaaggcgaaatcattgaaattttctctggtttagagaagaaaattgttcgtgctcgtgtattagcgggtgaacctcgtatcgatggtcgtgaaaaagacatggtacgtgctttagatattcgtacaggtttattaccacgtacacatggctctgcgctatttactcgtggcgaaacgcaagcattagtaacagctactttaggtactgcacgtgatgcacaaaccattgatgacatcatgggtgagcataccgataccttcttactgcactacaacttccctccatattctgtcggtgaaacaggtatgatgggttcgccaaaacgtcgtgagattggtcatggtcgtttagcaaaacgtggtgtattagccgttatgccaacgattgaagaattcccatacacagtacgtgtagtgtctgaaattacagaatccaatggttcatcttcaatggcatctgtttgtggtgcttctttagcactgatggatgcgggtgtaccaattaaagaatctgttgctggtattgcaatgggtctggtaaaagaaggtgaaaacttcgttgttctttctgatattttaggtgatgaagaccatttaggtgatatggactttaaagttgcgggtagccgtaacggagtcagtgcattacaaatggatatcaaaatcgaaggtatcactcgtgaaattatgcaagttgcgttaaatcaagcgaaaagcgcacgtctgcatattttaggggtaatggaaagtgcaattagccagcctcgtgcagaaatttctgagtttgcaccacgtattcacactatcaaaatcaatgctgataagatcaaagatgttatcggtaagggtggttcagttatccgtgcattaacggaagaaacggggaccactatcgaaatcgaagatgatggcacagtgaaaattgcggctactagtggcgaacaagcaaaacaagctatcgctcgtatcgaagagatcacggcagaagtcgaagttggccgtatctataacggtaaagtaacacgtatcgttgatttcggtgcatttgttgctatcggtggtggtaaagaaggtctggtgcatatttctcaaatcgcagacaaacgcgttgagaaagtaagtgattacctgactatgggtcaagaagttccagtgaaagtactggaaattgaccgccaaggccgtatccgcttaagcatgaaagaggctcaagcaacccagcaggaagcagctgaaacttcttctgaagatcctgcaaattaatgatattctactaccgatatctagacataggtatcggtagagacttattatgattgacaagtaggacgtcataaaacgctttttgttgaaagagtctgactttgggagtgagaaatgaaaacatttctgcgcggttgttctattgctgttttcatctttatttccgggtgcagcactagtccagaatggcgtaagaatgctatttttgctactccactacagccttctttacaacaagaagtgatattggctcgtatagaacaaattctggcgagccgttcattaaccgaagatgaatatgcacagcttttatatgagcgtggtgtgctgtatgatagtctcggtttaagagcattggcgcgcaatgatttttcaatggcgttgtcaatgagaccagatatgctagaaatttttaattttctaggtatctattttacgcaagcagcgaattatgatgctgcttatgaagcgtttgattctgttttagagcttgatccaacttacaataatgcgcgttttaatcgtggtatcgctttatactatggtggccgattgaaattggcgcaggatgatctgcaggcgttttatcaggtcgatccaaatgatcccattcgttcgctttggttatatcttgttgaaaaagagatagactctgattctgctaaaaaacagctgaaacagcgatacctacaggcgaataaaacgggacaatggggatggaatatagttgagttttatttaggtgacattagtgaaaaaacattaatggaaaggctaaatgaaacgtcaaccgataacacttcgctcgctgagcatcttagtgaaactaacttctatttaggtaaatattacctaagtctgggggacatggatagcgctgaagcgttattcaagctgacggttgccaacaacgcacataactttgttgagcaccgctacgcattgttggaattagcactgttaggccaacaagaagacctagcggaatcggaccagcaatagctgacgaacatttctttgatcagtttgaaagccatcatctgcataggatgagggcttgtttgttcgtttaataatataatttgagccagttcacattttagatgataaagaccgacaaaccatgcggtatgttatgtcaactggccgccataatgaatgaggcacagtgacatgactactgaaaccgatatgacttttgctgatctaggtttatcagcacctattttgactgcactgaatgatttaggctacgagaagccttctccaattcagcaacaatgtattcctttccttttagatggcaatgatgttctaggtatggcacaaaccggtagtggtaaaaccgctgcgtttagcttaccgttattacacaatctagatgaatcattaaaagcaccacaaattttagtgttagcaccaacccgtgaacttgcggttcaggttgccgaagccattgaagatttttctaaacatttaccaaaagtgaatgtcgttgctctgtatggcggccaacgctatgacgttcaactacgtgcattacgccaagggccacaagttgttgtgggtacaccgggtcgtttattagatcacttaaaccgtggcaccttagatttatctaaactaaaaggtttagtattagatgaagctgatgaaatgttacgtatgggctttattgaagatgttgagaatatcttaagtaagatcccagcagagcaccagaccgcattattctctgcgacgatgccagaagctatccgtcgtattacacgtcgctttatgaatgatccaaaagaagtacgtattcaaagcagtgtaactacacgcccagatattagccaaagctattggatgacttatggtgcacgtaaaaatgaagcattaatccgtttcttagaagcagaagatttcgatgcagctattattttcgttcgtacaaaaaatgcgaccttagaagtagcagaaaccttagagcgtaatggctataacagtgcggcattgaatggtgacatgaatcagtctctgcgtgagcaaacattagagcgtctgaaaaacggccgtttagatatccttatcgcaacggatgttgctgcgcgtggtctggatgttgaccgtatcagcttggttgtcaactatgatatccctatggattcagagtcttatgtacaccgtattggacgtactggccgtgctggtcgtgcgggtcgtgcaattctatttgttgataatcgtgagcgccgtttactgcgcaatatcgagcgcacgatgaagatgtctattcctgaagttgaattaccaaacgcagagctgattagtcagcgtcgtcaggaaaaatttgctcagcaaatcgctcaacagttagaaacaagtaaccttgaccaatatcgtgcattgttaccaaaattagcgccacaaggtgaagaagcgttagatatggaaacattggcggcggtattactgaaaatggctcaaggtgagcgtgcacttattctgccacctgatccagtacgtcgtcctcgtcgtgaatttaacgatcgtgacgatcgccgtaacgatcgcgaacgttctccacgtcgtgagcgccgtgatgcgggtgaaatggatctttatcgtattgaagtgggtcgtgatgatggggttgaggttcgtcatattgttggtgctattgccaacgaaggcgatatcagtagccgttatattggtaatatcaaattatatggctctcactcaaccattgagttaccaaaagggatgccaggcgatttattaagccacttcactcgtactcgcattatgaataaaccattgaatatgcagttagtgggtgatgcacaaccttaccgtgagcgccgtaatagcagccgtcgtgatggtcagccacaaggtggtcgtcgctttagtaaaggcgatcaaccaccacgccgtggtaatggcgagcgtggtaacttccgtggtcgcggtaataacgaaaacgcaccacgtcgccgtagtagctctcataatcaataagaaacttaaagtttattcaattttaagctgaattgataaaaaccagtccatacaatggactggtttttttatagtatgctgagcgtggtgtttggcgccttatatgcagccgtaagtagggtgctgttagaggacgacaggagtgatcccatctcctactagacaataagtaaatcttattattatttcttacttaaatttcttaaatgcttataaattgttgctgagcttatgcctaattcggcggatactattttatgtgttgctgaaaattcaaaaagtccactttcatttaattctttaattatctctaagttcttgtatttacttggaatatttttatttccataaactctctttttaattggttctagatgattctgtacaagattattcacatcttgtgaaaaattttcatgttttaaattatttgtatcagtaaaactatctattaatgcatttaatggcatatcgagagcaaagttcatacaaatcataccaataggtgtacctgcattatttacaattaaagtagatgatgatttaaatggccgaacactttttgtattgaaataaacctcccacatttgatctgttcgattaaattttgagagtttttctaaagcaatatttgttacgggggcacctaatccacgaccagtaacatgtccattaactatgtggataacggaatggcgtaaatcctcaaaactatgtagcactatttcacaataatcaccgagaaattgccccaaattatcgagaaaaggaatataagagcggagtagatgccgatcttcttcagtaatcttttggtttgtaggaaggtccataagaaattttacccataattacagttaaataattctaacgttaaaagttgtcgaaatccatatttagtatactcggataatactgagtaaaatatttttatactaagttaagttttatgatcctaagcacatactttattttcttaatatggctaaatacgggtataggaattcgaggaagaaattatgaaactaggtattgaaacagagtcctatcacctattttttcagcagggtgtaatggatgtttttgattttataaataaagcaactgaattagggctggatggggtcgaattaaatatcattcctgatgaaggattacacccagaatttggtgtgttaacaagtgatagccctgaatatttagcaaaagtacgtcaggcaattgaagataaaaatctttattgtgaattagatacacgttttacaacaccaaaggcattaacaaaagcaattgatatcgctcgaggaattggtgctgatgtgatacgtacttatatgtttcgtcgaggacaatacaatccgaaacaataccctaaaattattcaagatattaagtctattgttccattattaaaaaaatatcgtatacgtcttgcaatagaaaatcatgaagatgaaacggctgatgaaatcttaaatattgtaaaagatattgattctatttgggttggtgcacattgtgatattggtaatggcatgatggcgtgggaagatcctatagtaacagtgagcaaattagcaccttatacatatagcactcattttaaagatcatattgttacacatgatgatgaaacactggtaattacaggaatgcctcttggtgaagggagtattgatatcgatgaatgttttcgtttattagttgaacattcgcctgtaacacgtattaacttagaaaactgttttccctatacatctcattttgctagagataaaggaacggggggagtatttgaattaagtggaagctttgaagttaaatcaccaccttttgatacgcaattaattaaccccttggaatattattatccagctaaaatttctcctgttgcattaaaaacattaatggacgcacaagagcgttgtgtacaagtttctgttaataaattaaaagaactaagaaaaaaatattgttattaatatataaaaatagttatcaaatattggagtgatctcatgattattaatactacatcagcaccagaagctattggtccttattcacaagcaattaaagttgaaaatcatatttatatttcaggttgttgcccattcaatactcatgatggttctgttatgggaaatgatattgaaacacaaacattaaaagctatgaataatttaaaagctattatagaagctgccggtgcatcaatggatgatattgttaaaacgacttgttttattaaagatataaaagattttcctatttttaataatatttattcttctttttttacatcaggaaaatacccagctcgttcatgtgtggaagtttctcgtctacctaaagatgttttaattgaaatagaagctatcgcttataaaaaataggaaatatgatcatgaataaatggggaaaattatgttttcttattttgggtggtgggactatattcaaactatccagcatgaaagatgtattttatgtgccaatgcaacaagattggggattatctaacacccaaattggttttggctttactatttatgccattattcaaacaatcggattattttcatcattgtatattgccgatcgcttctctaagaaaattttattaccagcgggcttaattggggtaggtttatgtggtgcttatttaagcacactgcctccttttacgggttatttaattgcatttggtgcaatggcatttttcggtgaggttgtttattggcctgttttactaaaatcggtacgtttattaggaaataaagaagaacaaggacgtatgtttggttttctagaagctgggcgaggggttgttgatgttctagtagcttcgggagctctttatatatttgttttatttggtgaaggtaaaacaggtatgcaagcaggattaatttattatacgcttgctacaataatagtaggtataattacatattttattgtggataatgacgataagaaggaaacctcctcagcaagtgaagctaatcgccaagttttggaagggattaaaaatgtcgtaaaatgtcctaacttatggttagcatcaatgagtatcttctttgtttattctgcttactgtgggttaacttattttattccttttttaaaagatatttacgcactaccaatagcccttatcggtgcctatggcattattaatcaatatgcactaaaaatgataggtggtccattaggcggatttttagctgacaaagttgcaaaatcgccaacaatatatctgaaatggacatttttattatctgcgattgcaatggctattttcattatgttgcctcatgactcaatgaatgtctatttaggtatgactgcaacattaggtttcggtgcaatcattttctcgcaaagagctattttctttgcaccaatggatgaaattggaacaccaagacaatatgcaggttcagcgatggcgtttgggtgtattattggttatatgccttccatgtttgcttatgctctctatgggtcattattagataattttgagggcattcaaggatataactatgtatttagtattatggtcacttttagtttgcttggttttatttgtgcaaccatattagctaagcgtattaaaatgataaataacactttaaatatagcttaaaaatagacaccgcttaattgtgatctagcaaacactgcttcatcgattggcattagctaaatacggctatacctagtacaaggaatgcactttaagcgttcttctggtggcgataataaatcaatattttgtttattgccttggcgtaaacgacttaatgttttggctaaacgctcttgctctaatggattaagcaaattgttcaggtaaatggtgagcgagggcggtaataacgaaaatgtaccacgtcgccgtagtagcactcataatcaataagaatataattcactcagtattcaattgagttgatgatataaattgaaaaaccagtcaacaaaaattggctggttttttctatataaagtagaaataaataattactcaattgggtacattttattggcatattccaagagtgcattaatttctatattgatggtaagggattagacaaatggttggggtttgatcggcaaacggattggcggtttttagattttgattttgatatttttattgttgataaagataactttcctaattacaatcgtaataaaataatttacagtaaagccgaacaatatttaggtattaaacctgtttatagtcaattagagaataatcgattagtgctttatcgttgccattgtggtagtgattattgttctgtgatttcttgtactttagatattacagaacattaggtgaaatggaataatattgcatataaggatggattagatagagaggaggctttagatttggataagcatggaataacacctattaaacaatttatattttctagaaaacaatatcagcaggtttttaataagtatttagacacttatttgtaaatggttaaatactgattttatgtagggttatgatttattgattaattcaatcacctctgcatccataagtggtgtgagttttgcactaataacgatttttttgtatttgttattcaacccaccggcaatgacttcattgaataatcgaatttctacttgggataatccatcttcggtacgttctaaaggatgaattaccacatttctttttcgacaaaaaaaggataatgggttaatacctatttgagtaagtgctgttcgtatcgcttcaatagcagggtaaaaatcaccaattaacattcggctatgagtaaaatgacgttctacagaaaattcttttttggtgtgaagatcacgaacttcgatgcgattaatataaactttaatataaatgggttccatcaagcttattcctttttactgattaaattaagccaatcgcttcttttaagggtttaaggtaacgtcgactgaccggaatttgtttattattatgtaaaataagttctgcttgtccattatcaccaaaaacaatttcattgacataatccatattcactaaatattgacgatggcaacgtaccagcggagtgcgtgtttctaaagtacgtaatgtaagctcagtaaaaccttcttgcccttgattattggtgacatagacaccgcttaatcgtgatgtagcaaacacggcttcatcgattggcattagccaaatacggctatgcccagtacaaggaatgcactttaagcgttcttctggtggtgataataaatcaatattttgtttattgccttggcgtaaacgacttaatgttttggctaaacgctcttgctctaatggtttgagcaaataatcaaaagcgtgctcttcgaatgcttgaatagcatattcttcaaatgccgttaaaaagacaatataagggcgatgttcaggatcaagcattgagaccatttctaagccagtaatacgtggcatttgaatatcaagaaaaaccacatcaggttttttacgatgtatttcccctatcgcctcaatagcattactgcattcaccaataatatgaatatctttttcttcttcgagtaaacaacgtaaattttcacgagcaagcggctcatcatcaacgattaatatattcattgttatgctgcgttatccatatttttttctaagggtaaacagatttttattttggtatagttatcaggctgacactccacaagtacaccatatagatcaccatagcgtaatttaatccgcttatcgacaagtctcattcctaaaccgagctgatgtgatgcgccttgcgaatgataaagccctgcattatcactaatttcgatcactattaagtggtcttcttgatgcgctctaattgtaatctttccgatgcctaataactgtgatgttccatgtttaattgcattctcaaccataggctgaagcgaaaatgcaggaaggcgcgcagtggctaaatgttcaggtatctgaatatctatctgtaaactttcttgaaagcgcgctttttcaatttgtaaataagccgtgacgtgttcaatttcatcactgagtgtcactatcgcttcgggtctttttaaattcttacggaaaaaagccgacagaaattgcactaactgttttgcttgatcactatcacgacgaataacggcttgtaatgtatttaatgcattaaataaaaagtggggattgacttgtgcgtgtagtaatttaatttctgattctaatagtgattgtttatttctttcgtattgcccggcaagaatttgtgctgataatagactggcgatcccttctcctaaggttctattaatggagctaaataagcgattctttgcttcatagagctttatggtgccaataacgcgattattttctcctcgtaaaggaataaccagtgtcgagcctaatttacaatgtggagaaagggtacatcgataaggtgtctcattgccgtccgcatacacgacttcgttattattaatggcttgtttagattgttctgaggaaatcggtgtacccggcaaatgatgatcagcgccaataccaataaaagcgagtagtttatctctatccgtaatggcgacagcactgacttttaattcttggtagataacttttgcaacacgagtactattatcttggttaaagcctttacgtaaaataccttcagtgcaaaccgcaatttttaatgcttgagcggagaaagcactggtatatttttcaaaaatggcacgtctatcttgtaatatcctaataaacatcgcagcacctattgtatttgctacaatcataggagcggcaatattttttactaaagaaagtgcttcatcaaaaggacgagcgagtaataaaataatactcatctgtattatttcggcaaaaaaggtgacggtagccgctgtccaaggattaaatatgcggtgcatttgtccatgttttacataataacgatgaactaatccaccaattaatccttctgcgatagtggataccatacaacttaacgctgtcatcccgccgagggaatagcggtgtaagccacccgtgaagccaacgagaaagcctacatacgggccacctaataatccgcctaatacggagccaatagcacgggtattagcaatagagtcattaatatgcaatccaaaataggtgcccataatgcagaaaatggagaaaatcacatagcacattaatttatgtggaagtttgatagtcacttgtaaaagaggcgtaaatagcggcgttttgctgagaaaccacgcaataatgagataaacgcacatttgctgtaataacagcaaaattaaatcaaattcgtacataagttgtgtgtaccattttctgtgtttatttaataaattaaaaaaacgtagataaaatgaggctattcgtggagtaataaaatttggtataagaataacttaatcgtactatcaaagaaaatcttcctctgagtcagtgatctagcgcacaaaattcttaaagaaatagtcagttattgtgtaagataacgctatcagtgagtgttctacttcactattaaggtctaatcgttatatgaaaaaaagagccatctatcttattttattaatgctaatacttattgcattagccgttcttttccgcgcgcataatcaatatttattactgcaaggtgaagtggatgcacctgaagttattgtggcctctaaagccaaaggacgtgttatagagcgtcatattgagcggggtgatgatgttaaagcggggcaattgatgatcaccttagatagcccagaactcaatgctcaagtggctgcactggaagcggcaaaagcccaagctcaagctcaattagatctctctattcacggtacaagagaagaaagcattcgcaatttacaagcgatcttatctcaggcgcaagcacaagccaccaatgcaacgaaagattatcagcgtcttagtgcggtcgccaataaaggttatgtctctgccaatgagcttgatagtgctcgtagtcgtcgagatgttgccgtgcagcaagccaaagcagcacaagctgaattagatgaagcgaaaaatggtgatcgtattgaattacgtgagaaataccgagccgcactacaacaagcagagcagcaattaattgagctgaaagttcagcaacaagatttacaggtaaaagctccggttgacggcgaagtggggcctattcctgcggaagtgggtgagctttttaatgccaatagcccattagctacattaattcgtctccctgaagcctattttgtatataacttgcgtgaagatattttagccgatatccgcaaaggcgatcgcatcaccatcactgttcctgcgttaggcaataaagaagtggaagcagaagttcgctatattgctcctatgggagattacgcaacgaaaagagcgacgcgtgcaacaggagatttcgacttaaaaacctttgaagttcgactgtatccaacggcacaaattgaaggactacgtcctggtatgagcgcattatggcgttgggataagtaagggcgaataatgagagtaaaggcagcttggcgtggttttaatagcgcattctcacgagaaacccatatggcagtgcgaagcccagtgttccactggctaagctggctgtttccattaatgttattcacattaattagtgctaacttttcagaaggtactttgctgaacttgccagtttccgttatcaataatgataatagtccactatcaaaaacgttgatccgagatttaaatgcaggctctcatgcaaaattaagtgcactagatacaaatccgcgaaccgccttagagcagctaggaagtgcaaaagattacgctattttaatgatcccccgccattttgaaaaagatgtattagcaggcaaacagccgacaacccgaatgtattacaatgggttgtattatgctgcgggtagctatgctatacaggattttagcgggttaattgccgagcttaatgctcaatatcgcactgttttagcgcaagagatgaataagccagtgccgcctttagccaaagtaacactctcttatgacagcctgtttaatgctagtggtagttatatctactatcaacaatttgctgcaaccattcatatgctgcaactctttgttgtcacctgcacgatttactccttatcacggggtaatatgctattaaacctaaaacctttcacttttgccctaataggtaaattagcaccttatacgctgtttttcttaacattattaatggttgaattagcggcgttagtgcatttttcaggggcaaaagtcaatggtaatccgctttatatgatattggtggggttcttttatatcatcgcggcacaaagtattgggttgctgttgtttacatttaccaatagtgcgataaccgcatacagtatgataggtatgctagtgagtatcgccttagctttttcagggatggcggtgcctgaactgtcgatgatattacctgctcgaatcatttctaatctagagccgttaacgcacgccttaaatgctatgtttgatatcttcttaagggaagtttcgttacaaggtattctttatgtgtgcacgcttttgttgatttatccttttgcgattgcgcttttagttcgcaaacgcatctttaaaagattggaattacaggtaggtgtcgtatgatgcagatgtatttccaaacatttaagcgtgttttattaggcatgttagaaaaaccgatgtggatgttattattggtttctctttgcattatgagtttagtctacgctaaacctgtattgtgggatctgcctgtggcggtgatcaatcaagatcatagccccgccagttatgcccttatccgctcattagatgccacacctaaattaagcttaaagggatatgataatttagatgaagctcgtcatgacatgatcatgcgtgaactgtttgccattattatcattccaacagattttgaaaaaaaactgcttaatggcaaaaatgttaccgttcctgtgtatggagatgcgaccaaccgccttgctagtggacaaattcagcaagaattaatgcaggcgtatcagcaattattagataactataacggccgtatcttacaaaatgcgggttttagtgcgacacagtcaaaaatattattaaaaccgatccaaagtgaaactatcgccatgtataaccctggggtcagttttgccgccattattttcccaggcttgttagtgatgttattgcaacactcattattaattgcttgtgtacgagtgagtatcgccgtcagaggaacgccaaaagggaagcctccgttagcggtatatttaggcgcgctatctgcacttataccgatttggctctttttatcttcggtgttctttgcactatggccgtgggtattaggctatcgtcaagaagcaccactttatcaaatttggatgttgaccttcccattcttattagcggtattaggattaggtaagttgatcaccgaatgcttgcgcagtgttgagatgatttacttaacattggcatttgtgacgacaccagtattctatatttcgggaactatttggccattacaagctatgccggattgggtattggcaatatcctctgcattaccttctacatgggctgtaaatgctatggccggaattaaccagatgggattatcattccaaagcatcctaggggatatcgtgatgatgctggttttaggcgtgatatataccattttgggggtgttagtgggtatgttgcgcaatggtgagttaaggaaaattactcatcaatttaagcattgggcgagacattaccaccgttcaaagtaaataatatctgtaatatgctaggtaaataggacgggattactgaaaagttatcccgtcttttttattttagtgtaaattttctataatagtctattaataacaaaaatttgtttaaattattttacttttatgcaatctctatctaaagatattatcttaataataataatgtttttaataagcttaaataattaatgttattgctataataattgatgtgaactattttaagtgcttttccttatcttaatatataaaaaataaattgattactttttatataaacataaaaaacaaataattatataaaaactagtaatgacacttaattaaaataaaccaatcttattgtaataaatttaatttagaagggctaaataaaataatcaaaataaaacattcaattaaagtaagaataaaaatttaaaaaaattaattgttaaattttaattaagtattattatattgatgtcaatttaatttcttagtaacgtttatcttattatctaaataagataaaagtctatgaaaaatcgtaattaaatgtgtttattattttctaggaattaaggtaatttatatgaaacttaattatttgaaactttttgtgatctctgcattatctgtaggttctgtttttgctgtttcagctgaagatcctgtaggaaatggacctgtaaccgtgaatggtggcgaaatattttttaaaggtgaattagtaaatgcagcatgtgctgttgactcttcatctgatggccaaatagttaaattaggtcaagtgagaactgcaaaattagcgaaagctggtgattttagcgaaaatactaattttactatccaattaaatgattgtgactctaaagtagctagtactgcaaaagttgcttttacaggggtttctgctgcaggacaagatgacgtattagcagtatcttcttcttctgctggtggtgctaaaaatgtcggtattcaaattttagatagtaagagtgcaccaatgtcttttgacggcgctggattcggtaatgcaactaaattacatgatggaaaaaatattattccattccaagcaagatattatgctttaggtgcaactgaacctggtatcgcaaacgcgaacgcaacctttgctgtccaatacgaataatatatagccttatactattttttagtataaggcttttttacttttttgtgggttattttaataagacatacaccaagattagctatagtggattataaaaatgaatagtattctaactttttctaaaataaagcttctttttttaatgctcttaactctatgtgtcattaaccaagcatatgctgctgtatcattaggggcaactagagtcatttattttgcaggtgaaaagcaagtaaaattaccagtaattaataatgatgaaaaacgttatttaatacagtcttggatagaaaatagcgaaggaaagaaagataactcttttgttattacgcctcctctattttctatgcagggtaaaaaagagaatactttaagaattatagatgcaactaacaataaattaccgaaagatagagaaactttattttggttgagtgtaaaatctatccccgctgtagaaaaatcacttgctaatgagaatatgttacaacttgcgattattagtaaaataaaattcttttatagaccaaaagatctcaccatatctccagatgaaaattataaaaaactacaatttaaacgtaataatgacacacttattataaaaaatccgacaccttattttattacgatgactgaattagaacttggtggtaaaaaattagagaacactatggttccaccttttgaagataagtctatctctattccaacatcagcttatgggaaactctcgtttcaaactattaatgattatggtgccatcacaccaaaaacaatcgtcgacgttagataatcattatttaatattgtagaattgaaagagtgatattatgtcattttcaacaggtataaatagcttaagcggcataaaaataaataacgtaaaattatttatttttatacttgcgctactattttcagttgactcaaagtctgaggaggagttttattataacccctatttcttatcagataacccggagtctgtcgctgatctatcttcttttgagaaaggattagaagtacctgaaggtaattatctggttgatatttacttaaatgacatattcttaaaaacccaatatatcaattttattgagaataaagggcagctatcaccatgtatcacaaaagcagagctaaaaagttggaatgttaatttaaatctcataacggatgaacaaaataaagataaaaataatgttgaacagaaaaatgagctcgatgaacattgtcagtcacttacttcattaatttctcaagccacagcaaattttgatgttggttcacaaaagctcaatctcactatacctcaagtatatttagtcaatcagtctcgaggctttattccaccagagttatgggatgatggtattgtggctggatttattacctatattttaaatgggagtaaaactcgcaacgatggtagcccagatactcattttactcatctcaatttacaaagtgggatcaatcttgggccatggcgtcttcgtgataactctatttattcttatgattctattaataaatcaagttggaaacatctgaatacttatatagaacgtggtattaataaattatattctcgtcttattattggtgatagctacacacaaagtgaagttttcgacagcatcaactttagaggctttcaactgtcatctgatgaagttatgttaccggatagccaaagaggttttgctccgattattcgaggtgtcgcccggactaatgccgaggttactatacagcaaaatggttatgtgatttaccgtaactcttttccaccgggtccttttgttattgatgatctctattcaacaagtaacagtggcgatttagaggtaaccattactgagtctgatggttcaacacaaacctttactgtgccatattcatcagtccctttattacaaagggaagggcataccaaatattcagtgactgtaggtagttaccgttcgggtaatgatgagcaggagcggccttattttttacaaggatcagtgatccacggcttacctgcgggttggaccatttatggaggaacccagttatccaaaaattaccaagcggcaagtattggggtaggtaaaaatattgggcgttttggggctttatcatttgatattaccgaagcgagatcaatactacccgatgactctacacaccgtgggcaatcgatacgtattctttataataaatctatcaatgaattaggcacaagggtgcaacttgccggttataaatatgcgacgagtggtttttatactttagcagagactacttataaaaaaatgagaggaaattatatacaaacggaggatggtgttgttgaagttagtggattaccacaaagttactacgaccttatttataataaaaggcaaaggatacaactcaatattactcaaaaaataggtgatcaatctacgttatatattattggtactaatcagcgttattggaattctaaaaaacaagataatcaattacagataggccttaatactattattaaaggtattaatttaggcctaaattatagcttatctaaaacatcatggaatgatagtaaagatcagatgctagcatttaatactagtattccttttagtaactttatgcgttctgataatgattctatatggcaaaatgcgagtttaagtactaactcctcgcataacatgaagaaacgttttaacaatactataggattaaacggtacattattggaagataaaaacttaagttacaatattcaaacaggttattctcatgaagaagaatcggactcaacaggatatgcctcattaagttataacggttcttatatgaatagcaatataggttataactataccgatacatcacatcaaataaattatggtatgagtggcagtattttagctcactcaggtggtataacacttagtcagcctatatatcaaacagcggtgttagtaaaagtacctgaagttaaaaatataaaattagaaaacaatagtggcatcacgacagacagtaatggttatgcggttttaccttatatttctgaatataaagaaaatcgtattgcattggataccaattcattctctaacaatattgaaatagataatgcggtgaaaagcgtagttcctactcgtggagccattagtgcgatcacatttgagcctagtgttgggataaaagcaattacgacattaacccataaagggaaaccagtacctttcggggctatcgttgattcaggtaataatactgggattgtggcagatgaaggaaaagtttatttaacagggttatcaccttcaggacaattaaaagtgaattggggtagtaagaaagagcaacaatgcttagtaaattacacattaccaccacaagatccagataaactttatgttgaatatagtgcagagtgccaccctattaaggaataaataatgactaataatattaagggtattttgacaacactatggttatttttcttatcattatcacctaatgttgcatattctgccgatagcattattcaaataacaggttatatgagagataacacctgtgcagttgcaccagaatcacaataccaaactattgatttattaaataatgaagttaagcggttatataaagtgggagaaacaacaccctttattccttttcatataatactggaaccttgtggagaatcagtgattgctgtgaaattctattttaatggtatttcagatagaaataatccttcattattagcgttagatccgatagcaacatctgcttctggtgttggaatacaaatattagatagtgaaaggtcacccattcctattaatccaagtagtgaccaacttaaatggatccccttagttgcaggaaaaagtaacaccgtttttttctatagtcgattaatggcatccgatatgcctgtcttagctggaaaaattaaagccagtgccacttttacactcgagtaccaatagagataaagagaatcaatgatgaaatataaatggcgaggagtaaaaaacgtaatatttgctattttatgctgcaatacttcattcgctatggctgcagatgcaacaattactgttaatggaagtgtaatagcaaggccttgtgaaacaatcacaaaaacagccaatgtggacatgggcgacctatatacattcgattttatgacccctggctctacctctaaatggtatcccgttgatttggagttaagaaattgtcctattggtacaacttctattgaagcgacattcaccggtcttgatgatagtactggatactatagaaatcagggctcagctaaaaatcttcatttagaattacaagatactgcaggtaataaattaagaaacggttcaaaaaaagtggttgaagttggtgagtattcgtttgccgcaatctttcctttacgagtaagagccatctctgtaaatggtagacctacacagggatcagtacaggcaataattaatgttacctatgtatttatgtaattgttatttaattaaattatagaaaaaacattatgataagctataaaaaaacaatgcgttttttattgtatttaagcttcggtttattttcaaactcagtactatcatttacttgtaaagtcgcttcaacgggacaaattgtcggtgatggtgctgctaatatacgcgttaatttaacgcctcgagttgaagtaaaccagaatttggtagtggatttatctcaacaaattctttgtaaaaatgattcttatggtggacctagagatccaatagacgttgaccatgttaatttagttagtggaacgacttttggaggcgcgctgaataattttgacggctctttattatggtataacagttattatcctattcctctttattacgatacaaaagttattaatattaaagacagaaattttatcccactaaatcttagattgtatttgaaaagtattggtgctgcgggagggaagcaaataaataagggggatttaattgcaaaaatagaaatgtacaaaattgcagattgggatggtgggcaccctcgtttttttacatggaatatttacgcattaaatgatgttattatgcctactgggggctgtgatctttctagtagaaatgtcacgattaatcttcctgaatatccgggtaatgcgcaacctattcctttatctattttttgtcctagacaacaaaatatttcttactatttaacaggatcaacgtctgatgtgaataatacggtctttaccaatatatcatctaactctcctgctaaaggggttggaattaaaatatcaaataataatggtgttattcctgctaatacaccggtcaaattaggcaatgtgacgaataatagtgtgagtttaaggctatctgcttcgtatggtgaaacgggagaaagagtaagagcgggtaatgtaaaatccgttatcggtgtgacctttgtttatgagtagatgtttattaaaataaagtggaataataattttattttccaccttatttagatttcaaaaaatatctacttattcaactaattctaaaccagccagtttacgccaataaccattacaatcatgatgatggatggtgttaatagggtgtgcgccttgttcattttggcgaaattgttttaaggtagtaaaaacttcatcagactgcggtgaaagacggacgatatcgactaaacctgccattgaagttaaatcattacctaaattgtaacagtagccactttgcgtttgaataccatttaaaacaaacacttgttggttttcttgtgataatacctgacggccttgtgggtatttttgacagcaggtttcacaatcatctttagcacgattttccgagcgagcagtaaaacaacgcgctgaataagccaaaggaagatgaccataagcgaatacttctacttcaaatttatctctaatcgctaattcttcacattgaattaaaagattatttaaccactcacgagatagttcaactggcatacaccaacgtatcatgccttgtttctgtaataaacgtagtgcataagcgttatagcagtttaatccatggcctactacaaaaggtaaatgacgctcataaagcatattgatcacaccaaaatcatgagcctcaactaaaaattcaccgttatccaccagctttgctatctcttttagttcagaaggcgcttgtagtagtgctaaggtagaaaggatcacttgtttaccacttttagccacttctttggccagattaatccaatcttgtggtttagtctcacggcgcttactacagactgtttcgcctaagtagataatatcagcatcgctctgttttgcttgctgataaaatgtctcaagtgtttctttttgccaataataaagtacagagcctaatgcgtatttcatattattatcccttattattgccatttccggtggtaagcacctaatgttgtttgtgttccttcagatatttttcctaatgcactcatccaacgcggttgggttttaaaaccttgaggatcttttttacattggtcaatagctgcacgccatactcttgcaacttcagtaacatacgcggggctacgttggcgaccttcaattttgacagaggcaatattcatagccataagttcaggtagtagcgctagtgtatttaagctggttggctcttctaaggcgtgatagcagtgtttatcaacaaaataacgtcctttacataaagtaggataccctgcattttcatcaggagcataacggtctattaagacatcattgaggcgagattccataccttgtggtgtttgctgccaacggacaaaacgagctggggaacaggctccgacagtattaggcgattcaccagttagataagaggaaagataacagcgtccttcagccatgatgcacaaactaccaaaggcaaagacttctaaaggaacaggactactttgagccaattgtttgacttgatgaatagaaagaacgcgtggtagtacaatacgtgcaacatcaaaattgcgttgataaaatgcgattgcctgagtattagtggccgacgcctgtaccgatacatgacgctctatctgtggatagcgttcagctgcgtactctagcatagcaatatcggccaaaattaatgcatcggcacctaaatgagccgccatatcaatggctttttgccagcgttcaaatccatcaggatgagcaaaagtattaatggcaatatgcagttttcgctggtggcgatgtacgtaattgacggcttcttgcaatttcttttctgtgaagtttaagccagcaaaatggcgagcattggtgtcatcttttaagccgatataaacggcatctgcaccattatcaacagcggcttttaatgcgggtaagttacctgctgggcacaacaattccatcttcacttccctttagagattaaaaatgatcagaaattgtaataagcaggataaaaaaaggttttgatttagggcagagaatattgagttttacttaagtaaaattaaataactcaaaatatgaacaaccgattaacggaatattgatgtaggatcgcagaatcgctatctatatctggcacaatagccgcaattaaatgttaaggagtccgaaagtgtttaataaaattcgcacccgcctagttaaagatggccctcgtttcttgcgttaccctttgcaaatcacgccatttgctttgcaacgtgatattttagaacagtttttaagttggcaattccgcgaagcattagctgagggggatttacacttcttagaagataaatggctaaaggtagaaattaaagatttacatttgcagtggtttatcagtgtttgtgatgataaattaatcgtaagccgttctgaaaaagaagatgtaagttttagtggtaatgctaacgatcttattttaattgccgcgcgtaaagaagatccggacaccttgtttttccaacgacgcttacaaattgagggcgatacagaacttgggttatatgttaagaacctaatggatgcaattgagttagactctatgccatctgtattgcgttttggtttactacaattggctgattttgtgaaaagtggccttcaagatgaagttgaagacaccgcacacagccatgaactgagctcaacttcatgctaatacgtgttgaaattcctgttgatattcctgctattgatgatcttttacgccaatcatttccaacaggcgcagaagccgatttagttggtcacttacgtgaagagggattattaaccttaggtatggtggcaatcaatgacgaaggccggattgttggttatatcggttttacacctgtagatattgagggaaaagattgccaatgggtaggacttgcgccattagctgtggcgccacaataccgtggtcagggcatcggtcgtcaattgattaatgaagggcttgatagccttaatgagtttggttatggcgctgttgtggtattaggtgagccaacttattatcaaaaatcaggttttataccggcaaaatcacaaggcttgcattgcaaatggccgaatacagaagaagtatttcaattttatgctttagataatggcaatgttgatgatattcacggcttagtgaacttttcgccgttatttgatgaggtttgataatcgcatcttttcattatgctaaatactgtgcaacgtctgaaggctgatcaatgatcagcttttctttttgtattttttttaactgttttaaacgatattcaagttgagacgcttgttgcctatcgccaacttggcaataaaactccaatgataatgggcctttccctcttagtgctttcgcgccagttccattttgatgctgattaaatcgtcgctcaacatccgttgttattccggtataaagagagccaagacgatttctgacaatatagattgaccattgagtatcagccatcttttttcctttttgtgctacttatgattttaataaacaaaatttcttaatttctaacggtagttattaacaaacaactaagtttcaaatcttgtaattatatcaacacgttgtgaaaaatttatgacgtaaaaaacgtttttctaaaaaaatacattcaattattttgaaaaagaacagcaataattgctaattttaaagttaaattaaaatgcataatatgatccacatcacagagacacactccgcgatagataacaaatttagaatttaattggagttcatcatgaaaaaatctacattaatcgctgcaacattagctttaagtgctatttcattcggttcaatcgctgctgacagcgtagcaactagccatacctctactggtgagtatatcacaattacaggtaacgatactttagatggcttaacaactaaaattgcacaaatcgcaaaagatgaaggcgcaactggttataaagttatcggtgctacaggtgacgattatctgactgtaaatgcggaaatttatcgttaatttataattattctcgataagttacctgcacaaagagacacgcggtaagacgcttgttttggtgatataattatcacctaaacagcgtctcttttagtttctatgcaggtaaattatgtctacgccagactcgatcaaaataattaaacaatatatagccagtcaccatgtgtttaccttatgtacaactcgtgcattaggggatatttggtgcgcgaattgtttctattggttcgatgaaagcaacatgcgacttgtttttctctcagaaaaacatacacgacacgcacaaatgatgcaggaaaatttatttgttgcgggcagtattagtactcaagagctttctgtcgccaatctgcaaggcgttcaattcaccggtacagtgtctttattaaccgctaatgacgacatcagagcaagaaaacagtattgcttacgtttccctgtggcgctagccgccatccatgtgcctttatggcaattacaattgcaagaaattaaaatggtgaataatcagctcggctttggtactaagctcttttggcaacgtcactaagttactgcttattgccaaaagtagtaatttttttgctcccaaccttttaaagacatacatgaggtatagaatgtttttctatcttcttgattaatatctgctacatagctttctgtcatcggaacacgttctgtataggtctttttatccccacaacgctctttgtcgtctttacggcaggttttttctacatcacgataaacggtgtgctgtagtacctctttacgaatagggtaacgtgtattcgcatccaaatcacaaattaactttgcttcttgtaatgtgtaatcgggtaccccttttggctcccatttactactacacccagttattaaaacgattgaaattaaaggtaaaaaaacaaatttcatattaaatattgtcataaaaagaagaattaagaatactaatcataaaacaaaactaatcactttgactattgtttttgaaaatgattcgcatttgataacgggggtgactaaataggagcgctttataatagtgaagtgatccccagtagtgaggtgatttatcactggggatcatgggatattactcaaataatgaaagatttttttctatctctgcatctatttcagtatgttggagatgtttaacaccaagtttctttttcaattcactgcctagcttcacgagttgatctcgattggctttcgattgctttttaccccatttttttaaatggtagttcagttcatgatcttcagaaaagcttacatatttattatcacttaaaggcatatatcctccagttaattcaatgtgtattacttcaatttatggatcacctgattactactaccgcgccacagtaatgcgggatcataaagttcttgtacgaatttgccgtcaatcagtacgttaatatagctaacgacttcttgttgctctggggttaagtcagccaataaatagcctgtccaaacccaaatatctttctcagggcattgcgttttaacacgttttaccaattttaatatagcagaaagattttgggggtgcaggggatcaccaccggaaagtgatagtccttgtcgtttaatacgagtgtcttgtaaatcagcaatgatctgatcttccacttcttgggtaaacggcttgccagatgttagtgaccaagttgatttattatagcaaccacgacattggtgtacgcaccctgcaacaaacagggtgcaacgtgttcctgggccattgacaacatcaacagggtaatattgatggtaattcacagtattaacctaactgaccattagccagatgtttaactcgacgtttaacttcttcttgtttaccggcattaaatggacgcgaatcaggactgcctaaatagccacatacacggcgtatcaccgagactcttgcagggttgtgattaccgcatcgagggcaggtaaaacctttactggtacaagaaaattcgccggtataaccacagtcataacattcatcaataggggtgtttgtgccgtagtaagggacacgggtgtagctataatcccaaacgtcttctaatgcttttaggttatgttgtaagtttggatattcgccatagcatatgaaaccaccattggctaatggcgggtaaggggcttcaaaatccaacttatcatatggattgacttttttctctacatctaagtggaaactgttggtgtaataacctttatcagtcacccccggtataataccgaattccgctgcatctaaacggcaaaaacggtcacataagttttcactaggtgtactgtaaagactaaaaccatagcctgtttctgctttccattgatctgtagcttcacgtaaacgctgaataattgctattgctttagctctcaatgtttcatcatcaaagacgtgtttttgcgtaccaaataaggcattaatcgtttcatgaacaccgatataacctaatgaaatggaggcccggccatgtttaaaaatttcagcaacactgtcatccgcttttaaacgtacgccacaagcaccttccatataaagaataggggcaacacgtgctttgacgttttctaaacgagcaattcgggtcattaaggcttttttagccaattcaagacgtttatcaagcagcgaccagaatgcggcttcatctcctttggcctcaatggcaatgcgtggtaagtttaaactgatcacccctaggttattgcgcccttcgtggagcatctcgccattttcttcatagacgcctaagaagctacgacaacccattggggttttaaacgagccggttacttttaccacttgatcgtaatttaaaatatcagggtacatccgcttgcttgcacattctaaagcaagttgtttgatgtcgtagttaggatcaccaaatttatggtttaagccatctttaatagcaaaaaccagtttggggaaaaccgccgttttgcggtttttacctaaacccgccatgcgattttcaaggattgagcgttgaattaaacgtgcttcttttgatgtgcctaggccaaagccaaaggtcacaaaaggcgtttgaccattagccgtatgtagagtgttaacttcatattctaaagattgaaaagcgtcataacactctttttctgtacgtgcgttggcataagcttctttatccgctatttgccattcttgcgccactttatagtgtttgtcgtaactggctttgacaaaaggtgcaaggacttcatcaatacggttgattgtcgtgccaccataaatatgactagcgacttgagcaataatctgtgcagtcaccgcagtggctgttgaaatggattttggctgttctatttctgcattacccatcttgaaaccgttggttaacataccattgagatcaatcagcatgcagttaaacatagggaaaaagggtgagtaatcgagatcatgataatgaatttcaccgcgctcatgagcgagtaccacatctcttggcaggatatgtaattttgcgtaatgtttagccacaattcccgcaagtaaatcgcgttgggttgggataactttactgtctttattcgcattctcgtgcaagatagagacatcactctgttcgataagaccgcggatttcctgagttaatcgtcctcgttgctcacgagcaacatctcggtcatgacggtattcaatataagctctggcaatatctttgtgctcgccagccatcagctgattttcaacggcgtcttggatctcacggatatcgacattcgaacgtcctgcgagagattgtgaaacagattgagcgacaaactcacaataatcatcatcagtgatctgacaagcttcggctgctcttttgatagcatcgctgatgcgggtttggtcaaaagagactttacatccgtctcgttttatcactatggttttcacaatctggctccttaactatttatccacaggctctaatcccataaaaacaggtgatggcgtagcattgagactaattgtggataaggtgtgtataattactatatgttgtatctgtgtatttattaaagcacaatatatagtaattggaagcgaaataatcttgagtaaaactgatctaaatcaaggtatttttgctacatcaggcttggagagggcttggctgaattgtaaatctgagataaaaatggcagtaataaatgattgctcatttattgagaatataaaaaaagcaaagtgctcataaagagtactttgcttctttgatatgacaggtagaaaaataaattagcggatcgcgataacttcgatttctactttggcatctttcggtaaacgagcaacttcaacacaagagcgtgctgggaatgctgcattatgctctttaaagaaagcttcataagctgcattaatagtaccgaaatcatttaaatcttttacgaaaacagtcgttttaatgatattagcaacggttagacctgctttttcaataattgctttgacgttttctaaagattgacgtgcttgctctgccgcattgtcagacacaaactcacccgtagcaggatcaacaggtaattggcctgatgtgatcactaaattacctaaatcaacaccttgtacataagggccgattgctgcaggggctttttcggtattaatttcgtaagacatgtagaactcctgtttttataagattcatgctaacgcttgattagctcagcgctattatagccagcgcagaagacgagcaatatgatagatatcaggctttatcataaagtctataggtataaaaagaaaataatcctaacgctttctcgcctttttatacgatatttagcccatctaaatcccccatttatagcaattttttttctaagatagtgcttattagctatttctattttttcataaaaagggatcaacgcgattgagaggggattattctatttttagggtaggtgtttactatctgccctatcaagcagggcagatagccaataagaaatcaacgaataacggcgtggcgctcaaattctttttcgcaatatttgcaggttaataccacgtcagacgcgaatttttttacgcgaaagctactttgtaccggctcattatggctaatacagttgctattagggcagggtacaacatcttcgagtaattcaggtaaacttagcgccattttattgacgacttggtagtcatcaataatattaaccgtcgcttgaggggcatacattgctaagcgatttgcttgctctgcggttaaaaagacattttcaattttgattaaatcttttttacctaggttttcagaaggaagattaaaacctaccgttattctttcgtctgtttcggttaaacgaaatagagataggatcttaaagcccacctgcgccggaatatgatcaataacagtcccacgtttgatagcttcaacttttagtttgtgatcatgagtcatggtgtgctccttattaaagaactaagtttttatttagaactaaggcaagtagtgcctgacgcgcgtaaataccattacctgcttgttggaaatagtaagcataaggggtgttatcaacatcggtggtaatttcatcgatacgtggcagggggtgtaatatcttaagattatcttttacattcaccagatcagcactggttaagataaattgggctttgacattggcatattcagaaggatcaaggcgctctttttgtacccgagtcatatacaggatatccagctctgacatcacttcatctacagtttcatgctgactatattcaacaccatgctcttcgagtaaatgcaagatatgctctggcatggccagcacttttggggcaataaaatagaggtgatttcctgtaaatttggctaatgcttgggctagtgagtgtactgtgcgaccatattttaaatcacctaccatcgcgatattgaggttatctaatcggccttgtgtttctttaatggtaaacaagtctagtaacgtttggctagggtgttggttggcaccgtccccagcattaataacggggatatccccagcaaattcagaggccaaacgtgccgcaccttcttgaggatgacgaataacaatggcatcagcataagtacgtagtacagaaatagtatcagctaaggtttccccttttttacctaaagaggtgttactaccatctgcaaagccaaccacagatgcccctaaacggtggattgctgtttcaaaagataagcgagtgcgggtggaggcttcaaaaaaacaactggcaatcactttgtcttttaacaattggctattggggtgctgttttaatttgtcagcaacatggagaacagactccagatcgtctcggttcagatcattgatggagataatatgcttatgatagagcggattagtcattagagttctcctttgatgatacgataaatggtgcgatatgtgtttttctacagaccaaaaaaaacccctcaatgagaggggttttaaaaaatagctttttggaaaaaagagagcgcttacgaccggttagggtacgtaatgtgacaacaacttggcattggcgttgtttcatctttcctcctgacaaattgtggcgcattatacgcatctttatcttacacgcaagcgtttgcttttaattttttgcaaaaaaatttttttaatttaaaaatcaattagcttaaagaaaaggcaaaaaagcaccctttgtttaatcattaaaaaacggtgcttttgcatgaatatgtatttttaaaaaggatttgctaaggtcgccaccataaccgctttaatcgtgtgtagacgattttctgcttcatcaaatacaatactgtgttttgattcaaaaacctcgttagtgacttcaaaaccaccatataagccaaattcttctgctaatgcttgccccattgttgtctcttcatcatgaaaagccggtaaacaatgcaggaatttaacgtctggattacccgttagtttgattacatccatattaacctgataaggtttgagtaacgtaatacgctctttccaaacttcttttggctctcccatagatacccacacatccgtgtagagaaaatcggcgtttttaacgccttctgcgacattttcagttaaggtaattttccccccattttgctgagcgatattttggcattcagcgactaattctgcttgtggccaacacgcttttggtgcgactaggcgtaaatccattcctgttaaggcagccgcttcgagtagggtattgcccatattgttacgagcatcaccaagataagcaaaaatggtttctgataatggttttgtttgatgttcagtaatagtgagcaaatccgctaataattgtgtggggtgaaactcatcggttaatccattccaaaccggtacatcagcatattttgccagcatttctactgttttttggccataaccacgatattgaataccatcatacatacgtcctaacacgcgagcggtatcttttatcgattctttatgaccgatttggcttcctccgccgagataggttacattcgcaccttgatcaaaggcggccacttcaaaggcacaacgggtacgggtggaatctttttcaaaaatcagcgcaatattttttcctgtgagatactgctgttcatggcctgatttttttgcttgtttgagttctagtgataaagccagtaattgttgtatttctgctgatgagaagtcgagcaaacgtaaaaatgatctttggtagaaagggttcatagataagtatcctataattgaatttatattcaatttaatacaataaatattcatcatcaacccttaaacgtcacttttgaatgaaaaactctgcgatatgagccttatttaactatggagtgtttattccccctgtgggagaataaccaagatatctttcagactattgcggagcggaattatggcggacagcaaagagctagcagaacaacgtgaagaaacacgtcttattattgaagaattactcgaagatggcagtgatcccgatgcactgtacgcaattgaacaccacatttcatgtgaaaattttgaaacgttagaaaaagcggctgttgaagtttttaaattaggttatgaagtcaccgagcctgaagaaattgaaattgaatcaggtgagatcttagtctgctttgatgcggttagtgaaagtggtctaaatgctgaactgattgatgcgcaagtagaacagttaatgaatttagcggaaaaaatgggtgtctattacgacggctggggaacttattttgaagatcccgacgctgagtacgatgacgaagatggcgaaaatgaagatgacgaaagcgagtctgataagtcatcacgcctgcactaattggcgctatatgttgtcccaatgtaccagtctttaggtgcaaaaaagaacacccgccacaaattctttttgtgacgggtattttttaaatggctaatccatcataccaaacttaccattgtcatagtcatcaaaagcttgtaataactcttgttgtgtattcatgacaaaaggcccttgtcctactactggctcattaatgggctcacccgttaatattaatacgatagcgtctcccatggatcctaatgttagggtatcaccgtgggtatctaatattgcgatttcatgttgacgtacaatatcactgttattgagatgtatcgcacctttaacgacaaatagcatcgcattatgtccctcagggatagcatagtgtgaagtacccgcatgatttaagcgcacatcccacaggtttacaggggaataggtcatagcaataccagatgtatttgcatagtcaccggcaatgactcggacatagccctgtgcattaggtaattgcacatgaggaatatcttgcgcttttagtgcttgataacggggttgtgccattttatacgcgcttggcaaattaacccacagttgtacgacttcaagcatacctccctctttcgtcattttttcagagtgatattctttatgtaaaatacctgaagcggctgtcatccactgcacatcaccttcagcaattgtaccggcatgaccggtagaatcatggtgagacacttcgccttgataagctatagtgaccgtttcgaatccacggtggggatgagtcccaacaccacgcgcattagtaacaggcttaaataatgtaggctcagcataatccattaataagaatgggctatattgctctgcattctctttataagagaatactgtgctcatagaaaagccattaccaacccaatgtggattaggtgctgaataaatttgttttacctgtctcattgtcatgatgtttctcctgattaaggaaagaaaccgcaataacccagacacagaaggaggtaatacaggttatcgcgatttcttaatgagtatgatcataaattgttcgctctataaacaaaatagggggaatttgttgatggtattcaaaaaaaatgaatgatctttttaaggtaaaaaagtcagagatgataagtagaaaagcctaacaggaaaaatgattttaaaattattattaattattttccaaaataaaaaccacattctgctttataaaaataactcagaatgtagtttattcataaaactatatattatttattagtatcgccgcaaccgccgataattttagagatagatactgctgggtgtaataaatagtcgtagttacaatctttttctttgttgtaaacactaccagtacaaccagtcattacggtaacaaaagaagcaataagtgcaattttgacaaagtttttcataagaaattcctttttaattttagaatgttaaaagccatagcatgactttctgtgcataaagatattaaattatctataaatagcaatataaaaaaataggaattttaaaatagaacagaaactaaaaaatattttatttaagatgtgaaatatgattatctagagtaaaatgagaaataaattaaacttgtgtttttttattaaatttaagataaatatttaatgtgaaatagattgctaataatttaaatatagattaatcattaaaaatagccgtaaaatatcgctcttttataccattaagataaattcattttatattgataagtgctattgtgagataacaaaaaacccgcattaaatatgcgggcgtttagatctatacagcatgtagatacatggttataagaaatatcaaagtgatttcagcatacgaatttcacagtcgctgtggcctgtattacctaatgctttatcaataaactcaaagcctaatttttcatatagaccaattgctgcttttaaaatatcagtagtttctaagtagcagcgactaaagccttgttgcttaccaaactcaagagattgctgaacaatttttttcgcaattccttttcctcgtaacttagaagagagatacattttctgtaattcacaagtctccccatcgccacctgcaagaggtgcgacaccaccaccaccaacaatttcgccatccatttctaccacccagtaagcgctgcgaggttgatgataaacttcgaataaggtatctaaaatcggatcagctactgcaaatcctttatccgctgttaagccatgctcggcggaaacttctcgaataacgcgtgcaatgccggcgttatctcttttttcaatggctctgataataatattttgtgttgcattagggtttgcagtcatagttgcactcatcgttttacttattagtagaatattttttgataatgtattgagagagcaccggaaaggaacttcttcattgaaagtagcactgagggccactgaaaacatcttaattgattaaataggattgtaaactgttatgcctgtttatttatatgattaggatatttgttggtagagatatatttcaaatatctatttcattagagcgagaataatagagaaaaggcattatatagcactatttcactgcaaaacgagtcacaatatagtgaaaaaatgttttatttttaggtttagtgataaacctatatcttaagtagtaacgatattaggtgttaaaaataaactaaaacccgcaatcaatgcgggttttagtattaatggtgcaataacttataacgcagcaatagagactttttgggcaatcagcttctctttagcatttaaacaagatgctaaacgctcacgctctttggcgacaacagcctcaggtgcgcgattaacaaagccttcgtttgataatttgctgtctaatgtagtgatatctttctctactttttcaagctctttatctaaacgggcaagctctgcatctttatcaataaagccggccattgggatcaacagctctgcaccgctcaccagtttagttaccgataatggtgcttcttcaccttccgctaatgggcgaatatccgctaagcgacccattgcttttaagaaaccaatgttatcactgacgcgacgtttagccgtttcatccgcaccacgtaaaataacatccagtggtttacctggcgcaatattcatttctgcacggatattacgaactgcgacgataacctctttgatccattccagatcgttaagtgcttgctcgtcgactaatgacgcatcaaattcagggaaagcttgaagcatgatggtttcgccttcaatgcctttcacctctttaacgcgttgccagatagtttctgtaataaatggaataattggatgagcaagacgtaacagaccctctaatacttcaatcaaggtatgacgagcagcacgtttttgagcatcattacctttatgaaccgccggttttgataactcaagataccagtcacagaattggttccaagtgaattcgtataaaataccggcagcaatatcaaagcgataattatctaacgcttcacgataggcttttatggtgttattgaattcagctaagatccagcgatcagccaatgagaatgtcatctcaccaccttgatagccacagtcttgatcttctgtattcatcagtacaaaacgactggcattccataatttgttacagaaattacggtaacctgacagacgtttcatatcccagttaatatcacgccctgtagaagctaatgccgctaaagtaaagcgcagagcatcagtaccatgtgcttcaataccttctgggaactcttttttggtgcgtttagcaatacgctcagccatttgtggctgcatcatattaccagtgcgtttttctaacagtttatctaatgtgataccgtcaatcatatctaaaggatcaagtacgttacctttagattttgacattttctgaccttcttcatcacggataaggcctgtcatataaacggttttaaatggaacctgtggtttaccttcatcatctttaataaagtgcatggtcatcatgatcatgcgggcaatccagaagaagataatatcgaaaccgctcactaatacattcgttggatggaatgttttcagtgcttcggtgttttctggccagcctaaggttgagaatgtccacagtgcagaagagaaccacgtatcgagtacgtcttcatcttggcgtaatgctacatcggcagcaatgttattttcacgacgcacttcttcttcgtcacgaccgacataaacattaccttcgttatcataccaagccgggatacgatgaccccaccacagttgacgagaaatacaccaatcttgaatatcattcatccaagagaagtacatgttttcgtactgtttaggtacaaattgaatatcgccatttttaaccgcttctaccgcaggtttcgctaaaggtgccgcacggacataccattggtcagttaataaaggttcaataaccacaccaccacgatcaccgtaaggtaccgttaaatcgtgaggtttgatctcttctaataatcctaaacgttcaaattcagcaacaatagctttacgtgctgcaaaacgttccataccttggtaggcttctgggatctctgtgctatatacatcagattcaacaccgttagtgtctaatacttctgcgctaacacgaatgttgccatcaaaatccatgatattaatcatcggtagttgatggcgacgacctacttcatagtcattaaagtcatgggcaggggtgatttttacacaaccggtgcctttttccatatccgcgtgttcatccgctaaaataggaatacgacggttcattaaaggtagaataacctctttaccaatcagatctttataacgtggatcttctgggttaaccgcaacgccagtatcacctaacagtgtttcaggacgagtcgtggcaacaatcagataatctttaccctctgccgttttaacgccatcagctaatggataacgcagatgccacattgagccttttacttcgcggttttcaacttcgagatcggaaatggcagtgtgtaatttaggatcccagttaacaagacgtttgccacgatagataagatcttctttgtgtaaacgaacgaaggcttcttttactgctttagataaaccttcatccatggtaaagcgttcgcgatcccaatctacggagttacctaaacggcgcatttggttagagatattaccgccggactctgctttccactcccaaattttatcgatgaaagcatcacggccataatcatggcggtttttaccttcttcagcagcaatcttacgctcaacaaccatctgtgttgcgatacctgcatggtcagtacccgcttgccacaaggtatttttaccctgcatacgttgatagcggatcatggtgtccatgatggtttgttggaaagcatgacccatgtgcaagctacctgtcacattaggtggtgggatcacaatacaaaagctttctttggatgtatcaccattggctttaaagtagccatttttttcccaatgttgatacagaggttgttcaatctctgtcggattataagttgtatcgagcgatggctctttcggtgcggatttattttccatattctttacgtattcaataggttggcggcgtagccattgtcaaagtaaagccgacgctacgataaattttatatcgttctcgcgccaactgttttaattgttcatcgataggtacgaagtctatcacttcatggaaagctgtggcaaagtctgcaaattgtgactgcaaattaatcaggagatcacgcggggcattgccccgtttgcccggccaacataattcaacaggcgcaccataacgaggcccttcacctgctaggttatgaggcacaaattgatgtggctctcttgcccatagtgcttcatccaacaattcagcttgtggctgtgaatcacagacgagcaaaacccgtttgcctaaacgccaatgttctgcggcaagttgacaagcaagccattcatgggcttgtaaatcttgatgtattgatggatgttccattaaataaaacgtggcgtttttcatgatatcccgataatagaagggtattgcattgcaatacccttctatgagtctgctctatttaccttaataattatgcggtattactcgtcgctattcaaacctgcgcggtttaataagaactgcgacagtaaagatactgggcgacccgtagcaccttttgctttaccagagcgccatgccgtacctgcgatatctaaatgtgcccagttatatttgcttgcaaagcgcgctaagaaacaacctgcggtaatggctccccctaaacgtccacccgtattggcaagatcggcaaaattagattcaatttgctcatagaactcttcgcctaaaggtaagcgccatgcgcgatcgcccgcttgctctgaagcattcattaattcatgggctaatgggttatggttagacattaatccactataatgatgacctaatgccaccatacaagcccctgttaatgtggcgatatcaataactaactcaggctcaaagcgctcaacgtaggttaatgtatcacacagcactaagcgaccttcagcatccgtatttaatacctcaacagtctggcctgacatagtagtaagaatatcaccaggacgataggctttaccacccggcatattttcacagccagccaatacaccgatgacattaataggtagttgtaactcagcaacgacgcgcatcacaccatatactgttgctgcaccacacatgtcgtatttcatttcatccatgccatcagcaggtttaattgaaataccaccagaatcaaaggtgagtcctttaccaaccagtacgattggacgggattcaggatcttgattacctttatattcaataatcgacattaaagattcattttgtgaaccttgaccgaccgctaaataggcattcatattcagctctttcatctgctcttcaccaatgactcgggtagagacattcgcggatgagtcagcgagttggcgagcttgagaggctaagtatgccgcattacagatattaggtggcatattagctaaatctttacaggctttgatccctgatgcaatagctaagccgtgggcaatagcacgttcaccgcttggtaattcacgtcgagtagggacattaaagaccattttacgtaatggacgacgtaattcggttttattacttttcagttgatcaaaggtatagaggcagtcttttgcagtctcaaccgcttgacgtactttccagtaattattacggcctttaacatgtagctcagtcagaaaacaaactgcttccattgaccctgtttcattgagcgtgttaattgttttctgaataatttgtttgtactgacgttcatccaattcacgctctttaccacaaccaatcagcaaaacgcgctcagagagaacatttggcacatggtgcagcagcaatgactggccgactttaccttccagttcaccacggcgtaataaggcgctgatgtaaccatcgctgattttatcaagttgctccgctatcggagataaacgacgaggctcaaacacccccacgataatacaagcgctgcgttgtttctctgggctgccgctttttacattaaactccatgcgttctcctgaatattaaagacaaaaacggaaagtatcgtttagaatagtgatccgcattaatctaccccatagaaagtttactttttatgttaagctaaatgcattaattgaacacaactaatttagctaacttataagcttgttctgattgggaacctgtttatagcatgttttgatatcatttgggctgcaagaatgtctaactgagatgcacaaatgatagatatacaacgaagttagcgattttcctgcaaaaagacaagttttcacaggcataactagcgtgattataattcgatatttagctcgggaaacccttaaaagtcagatagccatcttatttatcttgatgcttatcttctttagccaaaagctggttgaaattttaggggctgctgtagaaggtaatattcctacaaaccttgtggtttctctgctgtggctggggatccccgagatggcacagcttattctaccattaagcctttttcttggtcttctgatgacttacagcaaactttatgttgaaagtgagataaccgtcatgaatgcctgtggaataggtaaaaaagcattagtgcaagcagcactattgttgtcattacttactagcgtcttggcggcagggaatgtggtgtggttgatcccatggtcgtctgtacatcaagagcaagtgctggaagatgcaaaagccaatccaagcttagcggcattaatggaagggcaatttaaaatgtccagtgaccgtaatatggtgctttatctcggtagcgtaaagggcaaccaattccaagatgttttcttggctcaattgcgtccaacacaaaaccaacgcccatctgttgtggtggcggataaagggtataccaaagagctaccaaacggtaaccaagtcgtggtacttagcgagggtacgcggtatgaaggtacggcggtactacgcgattttcgtattactgattttaccgattaccaagcggtgataggccatcgagagtctactattagccgtaatcgcgtcgaacaaaaaaccatgaatgagttgtggcactcaacagagcctgagtctatcgctgaatttcattggcgtttaaccttaattttctctgtggtgatcatggcgttaatggttgtgccgttaagtgaagtcaacccacgtcaagggcgagtgttaagtatgttgccggcgatgttgctttatttggtgtttttcctattacaaagctccttgcgttcaagcggtgaaaaaggaaaggttgacccacttattgctatgtggacagtgaatgggatttattttgctttagcgctgttattgaatgcgtgggataccttaccaatgcgcaaactacgtgctcgctttaagaaaggagttgcctgatgtttggtgtattagataaatatatcgggcgtacgattttgcaatcgattttgatgacgctatttttactggtatcactgtctggcattatcaaattcgtcgatcagctgcgcaaagtagggcaaggtgattttacgaccttagatgcggggatttatgcggttttaaatatcctcaaagatgtgcaaatcttctttccgatggcggccttattaggggctttattagggttaggggcattagcgacacgtagtgagctggtggtgatgcaggcatcgggttttactcgtttgcaaattgccggctccgtgatgaaaaccgcgatcccattagtactgttaacggtattaattggcgagtggggggcaccgcaaggtgaacaatatgcacgtaattaccgtgcagaaaagatcatgggtaactctttagtgtccactaaccgtggaatgtgggctaaagatggtaatcaatttatctatattaaccgtattaaaagccaaaatgagatgcaaggcattacgctgtataatttcgataataatcgaaaacttgaaactgtgcgttatgcatccagtgccacttatgatccagataaaaaagtgtggttactgaaacaagttgagcaatctgatcttacttcgccacaaaaaatcacgggtaaaaaacaggtatctttagagtggcagactcgcctaacacctgaaaaactgagtgttgtggcattagatccagatgccttatccataagtggcttatatcaatatgtaaaatacctcaaacagagtgggcaagaatcagccaactatgagctgaacttctggaaaaaaatctttgcacctatttctgttgcggtgatgatgctaatggcgctgtcatttatttttggcccattacgtactgtacctatggggctgcgtgtggtaacaggaatagcctttggttttctgttctatattgtgaatgaagtttcaggccgattaagtttggtatatggcattcctgccgtagtggccgccttagttcctggtatgctctttttagtattaagtttatggttattaatgaggcgtaatcgctaagtagtattaacgattaacaatgcttaaagaaaaagcgccttcaataatcaaggcgctttttttatcggtctataagttgattatttcgtttaaaaactttgtgctaaagcacgcacaagggcatttgtacctcgagtcacttcactaaacttggtgccattagctttacgggtgatgacaacaaaaacaccgatatttaattcaggaatggttgccatataggtattaaaaccaccgccaccaccggttttttggtaaatagcaggcacaccattggcaggcgccatataaacccatcctaagccaatgccatccgctcgccctgcaacatccatcccttcaatagaagatagtcgttggcgcggaaaataaatagactgctctttactggccgtcgcttttctcatcgtattatttgagtttaaaaagccttgcatccaacgttgcatatctgcaggcgtagaataaacacccccacttccggcggcggcgatagtctcagaacaagggctgggtctataaccaattaataatcgctgacattgtgtgctatttggcgttaacgtggtatcacgcattcccgcaggttgtgtcacatactgttttaatagttgaggatagtttttaccagaggctttcactaatgcatctgctaataaatcataagccagattagaataagaggcagattgtcccgccggtgttgttaaagaggctttttttagccagttccagcgatcgccatgggttggccaaataaaaaccggtctaccccattttccgccgggttgttcacgaggaaaaccactggtatgggtagctaaatgataaagacgaataggagattgattgttcactaatggaatatcgacaccataataactatatttttgcagaggatcagtaaccaacaacttgccatcatcttgtaattttaacatcacttcactcgtcattaatttagtaatagaagcaatacgtattaatgagttcattgacggggtttgacggctatcggggcttgtagtaccaaaagcacgattaagagattgcgtattgttaatcatgacaatcaccatcccttgagggttacttttttgataaatctgctgagcatacttatcaaaaatctcccggctattattcgcctttggtgataaggtggttggccattgtgacaattcaggcacattatgttgattaaacttagcgggtaacgttggcgttaccgttgctcgttgactacaggcattgagcgtaagtagtgcaataggaatgaggagatattttaggagatgttttttcattttatgatcaacataacgagtaaggtgaaagaaaagagaacaaaataaatcagccataacataaatggatgattgttttatcgcgttactttttgtttttatttatcatttttagtacagcacctaaaacaagcccaataaaaataccggccatgatccagctaacaatacccataccatcccctttatagcagatttaaaccaaattttgattatattatcagaaataagaatgtctatcagagcaatagtgggttaatgaaaagttgatgtaaaataggctgaaggacttctacaaagagattttttgtgaaggacatcataaaaatcttattattggttattttttgtacataaaaagggtgaaaaaaacaggaaagtattacaaaggtgttacaatcccccctaaattttgcctatttttactttattattagcttttctttattattcggttaacagttgtttatcaagtaaatgttaattaatgaatttatattctttaaattaattggtttctggttttatattctaaatctatatttaaattatccattttcaagttttttgtaaagatactcactctacgtgttatactttgtaatactttaattgttgtgaaacatacaaataaaacttaatataatctcatcaaatcgacagctaaacactaaatgagagtaaagacgtattaacaaaattaacaagggaaaatggttaaagagaaataaaacataacaagatgaaaggaaagcgaataaataaaaagagagtaaaatatcgccgtaataaaataataatgaattaatcatcagtataaataaatctattttaatagagggctttttatttaaagataagacttttatttaactaagtattattatcttaaaaaataaaaatagtttaaataacagtaagtaaatcaatagataggcaaataaagctatttattaactatatagtaaagaaatagttagaggctatctattttaaataacaatatatattaaatataacactctatttaaaataaaaattcttccttacaccagggaagaaaagggcagtgacattaaaaaaataacgatagtcataaaaataaaattaagcccttaaattgcagtaccgtcggatcaaaacactaacccagttttgatcctttttttatatctcgttatatataatttaatatatcgattttatctactgctcagttataacgatgacaacagaagataatccattatgcacaaataaatgaagtcagtgtgctaagagacttagggattgagacttgttaaattcaatgttgcttatcgatagatgaatgttacaagtttgccccattcatagaagaacgataagataaatgcactttttttcgccaatcaaactgaaaaccaacaataattgttgcgagggttcctcacgcaagtataatgagcctgttttccaaacacacttcagtgccggagtggcggaattggtagacgcagttgattcaaaatcaaccgccttcgggtgtgccggttcgagtccggccttcggcaccataagaacatcaagagacgtcagcgggcgtctttttttgtatctgaaatcccagttttacaaggctttttcccacttttcagtcttcccaagtatactaaggtcaacccacatcaagtacctgctgttggtatatgtgttggtatctctcgattcgataatagtttgtaccaacagaaggagataaatcatggctcttactgatgctaaagtcagggctgccaagcctctggataaatcgtataaattgaccgatggtgatggtatgcacttgatggtacataccaacggctcaaaatattggcgtttacagtatcgctttggcggtaagcaaaaaatgttagcgctgggtgtttacccggatatttcacttgcagaagccagagagaaaagagatgcagccagaaagttaatagcgaatggttttgatcccagtgaaaaacggaaagaagtgaaagaagagcaacaaaaggaatttaatacattcgagaaggttgcacgtgattggcatgcaactaatcagcgatggtcagaagggcatagccatcgagtactcaaaagccttgaggacaatatctttgttgctattggtaaacgtaatattgctgaactaaaaactcgcgatctactcgaacctattaaagccgtagagatgtctggacgtcttgaggtggcggcacgtttacaacaacgtgtaaccgccatcatgcgctatgccgtacaaagcggtttgatcgactataacccagcgcaagatatggctggcgcagttgcgacaggcaaacgagttcatagagcggcattagagcttaaacgcctacctgagttcttagaacgcatcgatgattataagggaaggcctttaactaaacttgcagtcaaacttaccttattagtctttattcgttccagcgaactgcgttttgcacgttgggatgaaatcgattttgaaaatgccatgtggacgatacctgctgaacgagaagcgatagaaggcgttaaacactctcatcgcggatcaaaaatgcgcactacccatttagttcctttaagccgacaagccattgagatcttaaaacagatctatcaattcagtggtaaccacgaactgatctttatcggcgatcataatcctagaaagccaatgagtgaaaatacggtaaacaatgcattacgtgtgatgggctatgatactaagacggaagtgtgtggtcatggttttagaacaatggcgtgtagttcgttgattgagtcaggtttgtggtcaaaggatgcagtagagaggcaaatgagccaccaagagcgtaattcagtcagggctgcttatattcataaagcagaacatattgaggaaaggcggctgatggtgcaatggtgggctgattatctggatgcgagtaggggaggggaaatttcgccgtttagttttgcgaaaataagtaatgagatagtgtgaggcatgcagatacagttttacatatattgctaaatgctcatcaaaagctggtcagtaaagtaagagtaaattaagttattgaattgttggggttgattgaaggaaggctgactggacatggcttccgccacgcgatgagcacgatttcgcatgagaagggatataactctgcatggattgaaatccaactcgcacatatcgataagaatgcgattcgaggtacttacaatcatgctcagtatatggatggacgtaggtaaatgatgcagtagtaccatttttcaatggttaattccttgaaatatattaacaaagttttgactaagtagggtctagtttactgatgggatacataacctatagtttagtagtcaagaactcgaacttaatgtgctttactacagaacgaaaattaacgttgtgataccgaaaaaatttggtagctaaggaaggaattgtagttctttcatttctgtgaatatttaaatcaatttaataacaaatcaaataattagcagcctacaaataacattgatctaattcaattatttagaattatgtattggagctattaaataagttgtgctataaaggaaaaaatcaagggagattaaaatgtctatcgatatcaaaaagttaaaatcaaaattaattgaagattataacttcgctgacgagattagcgatgatgaactcaatagagttttaagtgaaatacacaaaaaggatgcctcaacacaaaaagaagtagacgaaattgtctatacggtattagagggtaaaaggcattattctttcgaaagtctggatacatccaatactacatcccttgcattacagttaattcaggcggcaaaggtatatgctcaaacacaaggaagatgaaagcattcacatagagagtaaaaaaaaacttgatatggaattgcagtttttaatagatgagatgcaagctggaaaggataaaaacactattcttccactgttgaataaactgcaattacagttttcaacctatgttactgattttgaaaattttatcgttcgagtttcagaaaatgggtattatcgttcaaaatgtgaaataaaagatgttttaattagcgtagaaaattttttaaattcaagtgcagttgttgcagaagcaataaatacagtttcaagcatattcaatttaccccaatgttatcaagaaggaaatttcataacaactgctcaaataatattaaggacacatcagaaagaaaaatctgaggaattatctaaaatttataagaataaaggattatcaacaaatggctttgatagtaaagaaaaaatttatttgaacagacacgggtttgatatgaccagatttatttcgttgatattaggattaatttgtatactgtattttttatatgaatacaagataggtaatataaacaatggtataagttggtttaattatagattgtttattccagcaggtttaggagcaataatattttcactatttccggcaaccatgcaattaaaattaagagcaggagtgacagccacagggattgtcgcatttattatatttttttatgctgtcaatccagcaaaagttcctgattttcaacttcataatattgatagcaaagaatcatcagtaaaaaacaaatgatatccaagcggaatcagcttacatttcaaaaggcaaaaaatccaaagtgaaatttatagcatatgcattcttgccatttactatcgcaccaataattggcattccatttgataaatacttactcaaaaactatccagttgctcttttcacagtaataattattttctcgtccttataaatccactctatttacttgtataaaaaatcatataaatatgttaatgatgctgttttagctatctttactggttgggttacattgatatacttactcacgggggaaaaacaagggagataattccttcggagaaactaattgaaacacatccattaatgtattatctaataatattaaaactaactattgttgtaaatgggtttttggctaaaatattgattacattaaacgaattatattatgctcgtaaagctgaaaacaaaagtgggaaatatactgacgttttaaaaatgactatttccaacattaaatctttttttaatcctaagaaggaaagggtcaaaaagtagaataatccccataggaattattaatgcattcattgaaataatagcagaaaaaaccactgataaataatcattctttgcgacataaagcaaaaaacaataatatttaaaaataacacaaagagataaaaagtatatatttaacattcataatagtctccttttttataattttataattttataattttataattttataatttaaaaatatattaatataacgaaaactcaacttactcgataaaaaatagttaataggatacattaaactgataattacattaataaatgcgagtgatgaaatttttgactgagatcataaattgttgaggcgtaaagttgttgatattccctaatgtgctaaaatgttatgcaaggatacatttttaaaaaaatgtcgataaataacaatgcattaggggttaacattggcttctttacaggttttgaatgctatcgctgttaggattacacctccagaggacgaacagaaagattggtcctataccttaggcgccctctggcccaccgatcagcaggaggtcatcacatttacaacgaaagtagatgcaagatttcataagagcagcaaatctcatgcgaagtttcaaaaaccttatccaggaagttctttcccttcaaagctgtcaaaatttttagagaaagaaacttcattcgaagtcttcgtacatgattttatccagaaaaagttaattacatctgcaagacaatccagagcaagtaatggtgcaatattggtttttactcattaccaactgcaacatgaaaaggaagatggttctgttcataaagatttcgagcgacttcttgttttgatgcttaaaaacacagatgcattaagattcaaagaaaacctacaactaaatcccgttgatgtaattgacttagataaattcttgcagggagcaagagttgatataaccagattcatgtctgaggaagtagaagatgaagataaaaataatttatgcttcatccgtggaactggtgatgtaagaaaatattttaccgaatcaattggtgccgaagatattatctccaataaaaccagtagtgagcaatgtattaaagctttggagcaattctctcaccaaaaagaatttggtcgtgctttgagagaaaaaatcgaatccaagattcaggaactatttaataattgtaagcgtggacagtccataacccttgaaaagattcaaacacaaatcgatgctattatacccgttgatttagcagagcataaaaatacattcgtagattttgtaaacgaaaatggatttgaagttaatgaagaattcgaagtatctgcaagtgataaaagacaatatgaatggttagattttgaaaccaatattgcaaaaatgagtgtaagaaaacatcagattggtttgcctggttctgatagaccaattatctttgacaccgaaacaaacgaagtaaagctaactcagaagattaatgatccaataattattgctcggctgaaagagcttgcaaatgaataatagagaaatgcttagtctcttgctaaaaataaagcaagaagctaaaaatatcgaatatgatgacccatatcaggtatgggtcttcgacaattcctcttatgtagcaatagaggacgatatttctcgtctaaaagaagttgatgatctaaagttagaggcaataaaaaaagaaaataccatcaaggtatcacttttattaacatcagatatcaattggttttctaccaccattgaatattttaaaactcttagggtaagaataaaaaacaataaagaagcaatcgataatttttacattgaaaaattaagttcagaagaaatagaaactatatctaattcttcaaacgcatatattcaatggtgtgaaatactctcaaaaattgcagaccacgtagaatacgatgattcaaatttttggccaaattatatttttgttatggaaggtggtaaatcaaagaaaatcaccacttacaatttaccattaaaaaatattgatgagaattttctaaattcggttgatgtaagcccgtgtgatgtttctactttgacaaatgttgatctgcactcctatgagcgaaaacttgtattaagatcatcgttgattgagttatataacgattcgagtgagaaaaatacgttccttagctcaatattaaattcgccccagaaattgtgggatttattttctattaactatgaaatatacatcaacaaatattccataaataaagtaatacacgaggttgaaactcagaaattagatttcttatcaaagcttaattctttgattcaagaacatcagaccaaatcactttctatacctgctgttctagtaagcacagccataataaagggctggtctccatctggtttactgcttatatttgtagctatgctacttacgtgctcagtcgttatattaggcatccgtaatgccaaaaaatcattatcagatattattgaatcatctaataagacgatggttttattcacaaaagagaatgctaatgatgatgacgaagcattaaccaaccgtataaatcagatcacaacagaagctttaataaagctcagtaataaaaaagttgatgccgaaaaaaccttgaacaagctccaatggttgattttcattggtgtttcagtctggtctatgtttgtcttatatcaattcaaagataacataatcccagttattgaattagcctatgagcatattaagagtttcgttaattatttattaagcaagagctaataaatagaagcgaagcttctatttattgccttgttttttctgccatatggttgaaaaaatcaacatctaaatttattaatactttttctgttttttaataatgctctgtaaactttcattttgttctatctgaatacgtttaagctcatctatttgggactgtttttcatcaattttagctaataacttactgttcaatatattcagtgtattttttgtttcagtaacttcgtcatgaacttcatttattctattatcgtactctatcgaatttattctattactttcaaaacttagatataaagaataaccttgcattagcattgatataaatactaatattatcccaatccaggtgggccttttggatgcagaaatagctgttgatattcttttatgaagtccttgaatgacgtaaatatctcccccgtcagctatactttcaatactggtagatatcgcgtcaattgaaaacatgaattcccacaatacttttcccagagaaaaagcgagtacaattgtgccaacaaaggctaaaaccgcaccgacaatagacacatactcagagttaatcataagaaaatcgaacatgctttttccttgtcacactataaaaacaaaaaatttaaatttatagcaaaactactgccggtaattttttagatgtcccatcacaaaggactcctctatttttacctgttcctttaattatcattccactacaagagaggaatggcttccattttttaccaaatgtaggttcttttggttgcacatatcttacaccacatttttcacactttaaaatatcatcatcatcagagttttcttttagtattctgagtacttttttaatattttcttccaatgaagctacgttttcaaatttaaactttgtaccaatactatcaaataaagacgcacttattgcctcataatttaatttatccacattctcctcaaatacattcctaataaaaggacaaaatacagatacttgccattcattacctaaatcaaacgtatatgagtcacctatattactttgatttttgatcttaaaaccattcgcaaataaaataccgctaactttttctttggaaaacatatgtatctccttaacgttaactatttatgggtaaattttactacaagctcattaaacatgccataaagtggttatgactcaatgataattttgttcatacactcaacaaaaataccacaccaaatattgatatttacaaaaaagacaattattaatcatagcaatacatataaaaaggagtttatatggaaaaacaaccagttataattcatgctgataaacgcagaaaaaaagaaattcagcattgtaaaaaacacactaattctgttttggatttaaatctcttctattcacctgagactaaaaaaacatttagtaaaaccatataacaagccaatattactaaaaaatgtaaaacataatgctaaatatcattagaaagtcagcttatttttttttgcattttcagaatgacgaatgatatatagctaataaaattttatttttcaaatttattttcaataaataaaaagatagcttatattgattatcagctattcaaataagatgaattattttttgaaaatgttattcaatacgagattttcttgtgcagtagtagaaagctggattgaatcatttaaaaagttaacaaacaaatcatggaatacttgtctttcgcttaaatttgtccaatcccaggataacgcttcttctattgagatccagacaatgagtactctatcttcttttaaataaatttaaaatcgctcgtctggtgttctaagtgcatgtgataatattttatttctgttatctgaattggagtcgctatcaataagccaaaaaggttgaagtaatgtgaagtcaatcagctagttgaaagcaagaccacagacttgtgccgcttgcatcgtgcttactactttatagtcgctgaacataacgaattgtgacatcagcaatttgttcctcacagcaataatcagtcagcagcctgattaccgaatagagcttgttcaagggtaaatattcggcatttttttctaggccatataacagtatgttaccttagcgttttctggcgcaccctctgggtaatctgcaaccagctttaagtgttcaacatcatactgtggaaaatgaactactattcgcgatagtatcttaggattcaagggttgagttagcccctctcgattcatcaatatgtgcctgtagccaattttcaacctcgctctttaaccagcgagagctacgccctagttttattggtttaggaaactctccatcttggatcaatttataaaaccatttatctgttagtccggttaaacgggttataaatttcatatcaacgcattggtcatctaataagggaatcgcttgagtgctcattattgaactcctgtctttaaagttaaaaggcagaagggatatcgataaatgtttagggatatctttcttccaaaagatatccccctcatgttttttattggtagattaacggctgcatccgaaagaacgctcaccatcaccataatattttgtatgttctttggctaagtaacgacagcgttggtttaattcgaatatcgtactttcattgttggcattattgttatctagccaagtaacagcgttatctgggatatgaactaaataacgctccgtagagtagttaacaccaattgcactacaccatgcctgctgtattaatgcatagagtgttccttcggtttttgtgtaatcacctaagccccaatagacgtccttattgactaatagcaataagtgataatgtttccgactactgatctcaccaaactctctcacccaaacataagataaggggcatgaataattacgagcccatactttatttttgcgtcttaggtctgcgcctattttggcttttagggattcaatgaaacgagttatgactgttgaatcctcatggtaacaagttgttgatgacgggaagcgtaaatctacgcgaatagctgtgacacgattattggtgaggagtgatttacggactgttcggtctatctgacgaagatagtcctcattgtaggtataactagacatgatttattccttaaggttttttaagtcatatctagttcgatggatgtaaaaaatagataagttagtcaagattgcttgagtgatctttaggtctataaaatgccattcttactctattaaatatataactataccagcaccgtttttacacacagaagccctgcttgtcagaggctcagtgactcatctcattaaaaagtactctgatattaattttctaacgcgaaatggataacagcgtcactttcacaatattagaattatttttttagtatgcttatcaataaaaacagcactattgtattagtataagcctaataatctatgtataaccctttaaaattaaggaatgaaagaacatgaatatcacgattaaatcatgaataaaaatgtgttttaattagctatttattggtggttttaatggttttttattaccgtataataaaataatcatcatattttaattgataaaaaaatgaggttttcatgacgatgaattattcatatatagagaacgaaatttatggttatatgagaaagaataaagttttttgttacctcatatggcgtgtgttgagcaacagcaaagacgctaatttttatatgtttaaaatacgaaactacttaacagatctcacagttaaggacgactttagtagtgttataaaaacagtaacgaacggtttttttgataagaaatttatttttgcaccgaagagtcatgaagggcgatatgtagaatctattgaatatattaactttgttgtagctaggcttaatgcttttcaatactcagattatgttactgatatatatagtatgcttgactacttaagaaatgacgtaattaagaaaacctgccattacaagtactttgattggttaaaaccatccgatataaaaatgtgcaagtgggtctataactatctggtcaaaagtaaagcattgactaaaaccgaatatcaggatagtgaagagctttatctttacattgtgactggtttttatttatggcaatcaccccaagatgaaaaagataagcgctataaaaaattactcctagctcgaaatgagcgaaaacacagaacaactactcaatcaaaaggttcggtaaggccaaaaaaaacaccgaaagatattcaactttcagcagaggcaagaactaaattgacagagttagcccttaactatggtgtacccgcgtcggagtggttaaatagcttcattattgatgaatatgaaaaaatgaaataaatttcaaatatatatcatctatgcgaacttaacatatattaaggttgcaacgatgaataaactcgaaaatcattttcttttcctccctaaaggggctaaggatgtgtttttatcccatttgaataaactcatcaactactcccccaccatcggcctgatgggtaaaaccggagcaggaaaatccagccttatcaacgctctattccaatcaaccctatcacctgtgagtgatgtatccggctgcacacgccaagctcaacgcttcagtatggtgatgaacaaccatacactcacctttgttgatttacccggtgtgggagaaagccttgagcgagatagagaataccaccagctctaccgtaacttattgccagaactggatttaatcatctgggtactcaaagccgatgatagggcatggtcttctgatgaacaatgttatcgctttctcactaagcaatgtggttatcaatctgaacgatttctgtttgtattgaaccaagctgacaaaatagagccctgtcgccagtgggatgaactgtaccaccaaccatcccgtgaacaagttgctaacttagaattaaagcaacaagctgtgataacagcatttaaaccgcatcatccagtgatgacggtttctgcggcagaaggttttcagctcactgaattagcagagcaattaatacaggcgttaccggcgaaagccagtagcggtgtggctaggcaactgaataacacttatcggacacaatccgtggaagactccgcatgtaacaattttgggcaatgtgttagtgatatcgtcgataccataatcaatatcattccattacccccattgataaaacatacgatcagcactgtcaaaaacagcatcgtttccgtcgctaaatccctgtggagcctattcttttaacctcctacgttaattaattattcatcactctcagcgccagtccttaacgggattggcgcttttttatttctttttattggagtctcaacttatgaataacacaactgaatccgccattgcaatgacactcgtccttgatgagcaacgccttgatttttggttcaaccattttggtgcagtaaaagattgggccacctttgaagtggtcatcttcaccacgatgggtcaattctgcgatgagtatcatggcggttactgggagtacggctcactcaataatggcggtgcctttatctaccccgatatcaacgcagacaccttaaccctattcaacatgcacaacggcaatgaagccaccgtgagccaagaagcggcagggattgccgtatgccttatcctgtacagcatctggtcattccaaacaaaaagcgaagtgatgtgcgaccgcttttatcaactgcgtgactatgccctacaacattctgaatccgctgccattttccatttaattgattaatcaggagttttatcatgagtttattagcgtctcgttttggctctgctaacagtattcgccgtgagcgtccactcactatcgaagagttattccgtactgtaccgagcgttttctccgaagataagcatgggtcacgcagtgaacgctatacttacattcccaccatcaccttgttagacagcctacaaaaagaaggcttttatccgttctttgcctgccagacccgagtgcgtgatgtcagccgtcgagagcacaccaagcatatgttgaggctgcggcgacatgaccaaattacgggcgtacaagtgcctgaaattattttgcttaatagccatgacggttcgagtagctaccagatgttgccgggactctttagagctgtatgctccaacggtttggtgtgcggtgatgtattaggtgaagtgcgtgtcccccataaaggggatgtggtggggaaagtgattgaaggggcatatgaggtactcgatacgtttgagcaagtggctgaaaaacgcgaaagtatgcagtcgttattgttacctccacccgcccagcaagcctttgctgaagcggctttgacctaccgctttggtgaagagttccagcccgtcacgcgagagcaagttctacagcctcgacgctttgaagataaaaaagaagacctttggacggtgtaccaacgtctacaagaaaacctgattaaaggaggattatcaggccgcactgcaaaaggtaaacgcgctcgtactcgttcggtgaatgggattgatggagatatcaaactcaataaagccctgtgggtgatggcggataccttatttaaccaactcgctcctcgccaacccaactaattttcccaccctgacaggttgtgtcgttacgccttactttcttatcgttcaaataaaaagcataactttatttatcaatgaattacttatagtgatttttcactaaaatgcccaatgataatttttcccaacagacataacctgtcaatcccctaagttaaactccctcacttcttaatttcctaacgtctgttattgagagtaatacgttatgtttcagattaaccgaaaatatgaccgcatggctgtgcgactctctgcgctgattgcccgcttaatggcaggagaaagccttgtgctctcatgtttagcccaagagttcaatgtttctgaacgcacgttacaacgggatttacgtgaacgcttggcttatctgggtgtagaaggttggcaaggttgttatcgcttgcccatcaatacgctaaaagcttaccgagacaaagatattctaacttttgtgaaacagattgggatgactcgattgtttccggggctagacagccgcttactgggattactgttaacccaacagccccatgcaccttgtttgatttggcatcatgcccataagatttcggctttgcatgccgaccatttctatcaattggtgtatgccattaccagtaagcaatctattagcttactcacgcctgagcgtcgttttaatccactacaaccttatcaactgatttaccgcgaaggccaatggtatttattggctgaatatcatcagcaagtgcatgtcttgttgttggaggatatccaacaggttcagccgctcaatatccctttcacaccgaaacatacagtgatgcagctgtcacaacaaaacagttttatcgcggcattaccgcattttagattgatatcacaagtacttaccgctcttccatcactcaaagaaaggagccgaccatgacgctattaaccccaccagcatcgcatcccacacattgccctcactgttcttctgaacaagacatcattgcatggggcacgggctggatgtgccgcgattgcggtcatgaatgggccatgcccattcaaaatcaccctcataccgtgaatttatcatcacataaggaagcttaaaaatatgaataccgtttcacacttacagttgggtttagaacggatcgctatcgttatcagtattttgttatgcctttggatcacgggcgtattgctaacacatttccagcttatcgcccttaccatgaacccgtatgggatcacattgatgtacttcgttttatatctcttggcgttggttatcccacaactcttggcgcaattaggcttgtgggttttgagcgcctttaaggggattgattataaaatccatttcaaccccaaattagttgccattatatctaccatcattatcggattagccctctctagcctactgatcatcatgtcatccggttggctatacggttttactgaaggtatcgccaccacgatattgctagttgatttgcttattgccagtggtattgctttttatcttcatcggcgaattcgtcactgggtttcagtgcgattaaaccgctagccataacattaaacatgatcagcaatttttgttgtggataccttattcaccattcacaagatagccaccgaatacgccatatcagggaaaaccaagcacccattagacggtgttcataaagcgtcaatctgacgtttctatttatgttgataggaatttataatgaaaagatatgtagttgtaactgtattggcctcactgtggttgatgacatcaccagcctctgccaccagccagccccctaaaaataccatttgggaatatagaggcgatggcggtaaaaccttatggcaagtgtgtggaagccagaatagtacttgtaggatgtgggctcaaccaaacattatgttgctgtactgaatcataaatctgcgtcaggttgtgcatttggtgatttttatatcgtggcaagaactgatggaaactggcaacaacgcgatacaggcacttgtagccctaacgcttatgtccaaaaaggaaccattaataatggtcagtactcctcggtcgatattggtgttggtgggacgattgtagcccgttaccccattgggtattggagtatgcaaaaagagttctcaggcaagaatcgaccgcgctggaaagaaaaagaccgtactaaaggtggactgcaaaccaatcaacaataaataacattctcgctgccgtcacttgcggtagcgaggacgataaaagataacaaaaggtaatgtaatgaataagataaaaagtgtatttgcgataggattattggcattcagtgcatttagtttggcttaagaacaacagcgttatgcaagcatcacacatacgagctcaaattttattaaccaatgctactgtggttattcatttaccctcgataatggcggcaaccatatggttctagaccacgcggagtttggtgcacttgaactcacgctgcgaatgaaagatgggcaaggaaaagtattaggggatacggtactggaagtagaaccttttggcgattctagcgcaacgcgtgccatgtttactggattggaaattccgtgtgaggatgttgctgagtttgaagtggttaaagcggtggaagatcaaaacggccgtaaggttgagttaccgttatcgatctttgaggctaataatccagagttggcgaagatgtcggtagctggggaaaataattttagttgtagtcatttaaaccctgagatttatacttcgaagtgattcagagcgcacttacttgttacggatattgtgccaaaatcatgtggtttgatgattgctgctttgctttcaagtaggtgctccacgttcactaacgaatactcagagcatgcagacaaactgctggctatatttctttcgaagaatgtggaatgcataccaatcccccgatataaaggagctggtaatgactgctatagatcagtttgctgctttgttagcaactgtatttgcgtcccaaatcaaacaggtaggcgactaattagatcttgcgacgagcgtattgaatccttattcgttacgctttcggatgcagaaccattcaaatcatttctaggaatgaggtcgtgtatggggctgcgaatgcttaccgcattaggtggtaaccatcgttgcttcaacagcgccgaagaaattcaatactacgttggtagcgcactcgccagtaatcaagtaaatcgataaaaattcttttgatacaatagtttacattgtgcgagtctcgttcgatagacgttcgtggaatgaacagcgatgatggttaatacatcatactgagctagactttactgttagggggcagatagaaaaaggaaaatcacatcaattaactatccgagatttggcgtttaaatagataaggatcatttatcgatgctggaaggccaaaacctagtacgacggaaaaaatatttgctggtactggaagcacgcaagttgcccttactgaagtcataaaagaaaacaattaagatatcgaaagttattgtacgttaagatgatcatgtggacgtgttgaagtcatgatggatgttgaacaactgccctacaggaatacggattagataaaaacgtcacttcccgagatcctctaagcagaaatagtatttgcagtattcctaattttccgatgtttactaccgggaacgaagtagttcgtcgttccagcaaccagtcaccgctgcagctgcaaaagccagaaatatgcccatcaaacaatcagaataaaaaaccaaaaaatagtaatcgcgacaaatttatgacttaataatgaggttgcaccaataacttattgatattaaaaaaattagtgaatatcttttttaaaagagagtttactatgttatgtttgtaattattaattgcgcagtgtgacaacgatactatgacactcatctcccttttaaagcgtgaaggcccctgccttagttcaacgctggcgaatctgctgattcaaagcaaaaatatctctgctgaaaatgcgaggaaggttatctcacgggctgtcttggctggtgagataagtagcattaaaaacgtattcccaaagagggagcagtttgtatatctcaggaattcctatggtagcgatgagttttggcaggtattgaccgataagctaatagagagtggttcagcactgggtcttgctttgagcgcccttctggccagaggcggaatcattcctaaacgtgattttggtgctgcaagcggctcacctgtagctatgaagaaaaaaattccgttcagtatagtgtggcaaaggttggtgaaaatcggtttatgtattgaaattattcttcctgaaattggagaatgcatcgcactcagagaaaaagatgaaaggcggtatgacttcgtttcgagacaaatacacgcacgtctggtgacagagagcattttcatcacgacgatggttcagtggagtcagaacctcaatctgatcagctataacctggcaaggacgaggcaggatgaagaaggaaagtcacctgctatttcaaactatctgttcgatttaacaggtcccagctatctgtctcctcttgttacacgagggagcgatgcaaacaaaccaggtttttttgcctgtgacgttctgctggggaccaaagtcaccctggcccaagtacagccctttatagctaaatgtaaatcgctgaggagtataagaaacataggaaaaagtctttttatgctggccgccagtcagttcgacaaagatgcgtttcatgctctgaagaaggaaggcattatccccgctacacctgaaaatctgttcggtgaagagtttgcaaagtcactgcgtgaattgaacgattttttgttttattacttcacaaattccagctcgaatctggaaagaattgattctattatggttgcactaacgaatgttaaaggtgcagctgcacagctgcagggagcgctcttcgaatatcttgttgctgaagtgatgaaacatgaaggtatcgttgagataggaaaagttttccgttctgctgatggtaaaaaagcagaaagtgatgtgttcatcgctaagggatatcaggaagtaaggttcattgaatgcaaaggttataaaccctattcctttgtcaagcatgaagacgttaagcattggataggagatcaggtacctgtattcttcgatgccgccaaaaaagagaagccagaagctgacatttatgtagaattttggaccacagggaaactgagcgaagacagccagttatcactaaaaaaattctgtgacaataactcagtcaggaaacgctataaaataaaagtgctggaagctcacgatgttaaaaaaagattccatgcgaccagaaataaaagccttattaatgtttatgaaaaacattttgcagaacctttctacaaagagaaagatatggatgacgtcaggggaagttatcgtcttgcaggagggccacaattatacttcgaagatgaagaaaactgagatgttatttttaaattgttcttttgggattcatgaaataatacgtatgtgcattaaaggacgtttctatggaatttgtgctcaattgttcaggtcgggttaatgcctttagtaaaggctttggtttaccgcagactatcgtcatccttatccgcaaactgaaactgtgctgaatatttttcatctgtggctggatacctaacctgtcgacaggcgcgccagcatgaagctactctgccaacctttacatcatagttacataaagggtacagatgtcatttgaatgtcttcttcgctgaatgtagatctgaatttattgatggcattgcacagtaagtcttcggtgttagcataacctcggctgtaccgaccagattttgagttgatatagtatttgccgtcttttaataaaagttcgccggcaatacgggcaggtttaaagcctgttaggcagggatgtccctgattatcagactcaatgcccattagcaatgcgccgtcatgggcgatagcccagagaagttacggatggccctctttgtttactggagccgtattcatgaacgctgataatgtgatgttagccacgctatagaattttctgacgtaagcattgtccgtgataccatctgcattaaactcttctgccttgaggtatttaggagtacgtagttttccgtaggtatgatcaagccacacttcaatgttgatgttttttgtattgtgtatgtcaatgctggtcttttattctcttctcaagaaaaactgtattagttactatctctttttattttttcggactagctaccaataaagttcagattaacttttttaatattcgagaaggagagaatatattgatgttacacagacactaatatctgataacttatacagaaccaccagcatcacaattatctgtattagataaccatcaaaaaaagtaagaatttcatctgttggtacatgtgttggtataaataaatttatacttctatattttaatttagatcatgaggttaagtgttatgtacgagtccggccttcgcaccataagaacatcgagggacgtcaacggacgtctttttttgtatctgaaatccctgttttacaaggcttttccccactttttagtcttcccaagtatactaaggtcaaccttgcgtccctttaagccgacaaaccagtgagatcttaaaacaggtctatcaattctgtggtaatcattcgctagtctttatcgataatgacaatccgagagaaaacatggtaaacagtgcattacgtgtaatgggctatgatattaagacagaagtctgtgatcatggttttagaacgatggcatgtagttcgttgattgagtctggcttgtggtcgaaagatacagtagaaaggcaaatgagccaccaatagcgcaactcagtgagggctgcttatattcataaagctgagcatattgaggaaaggcggttgatggtgcagtgggaagctgattatttgggtgtgaatagggagaggctgtggaggcgtttgggtttgggaagtaatccttatatctctttatgatattacatatattgagtaataacataataggttaatttctataacatattcatttttatattgaaaaatggatattttaaaagctaacagatttgtttttaagtggaatatttaacttaaaaattatgatatattagattttatgtagtatatggcctactttttgtaaaatgagcttatagagccacaatttttagtacgtaaattgtgtattaattataaaaaaacatgttccataattgggaacatgttgatagtttatcattatgcatctataatgttcccaagttaggaactaaatctatggcaatgcgtttactcggacgagataaactagaaaaacttgtggatatagaaccttcatgtaaacgttggagcgatttgtggtcaacagaaatcgctaagagctactggaaatcaaaagaagaagtagaaaaacaatttccaacagttatcaatcttaaagataaagtttatttatttcaggtaagcaatactaattttaaggtggaaacaattatagatttcagtaaattagtagttcttattacctcaataaagggtaatgttgatgaatattaaagttatccgtacggaaactcaacataaagaatatctagagcgcatatattccttactgtcaatgatgccaactctaaactctagcgaaaatgatgaactggaattacttattactctggttgaatcctatgaaaattctaaatatcctattgagccgccagacccaattgatgctattactttccgtatgcatgaaaaaggtcttaagcaggtagatttggttccttatttgggaactaaaagtagagtttctgaaatattatcacggaaaagaccattaacagtacctatgataaaggcattgtcgattggtttgggaatttcaactgatacgcttgttggtatatatagtgaacaggcgaaaaagaatactgaaaatgttgattggtcaaaatttcctgtaaaagaaatgataggaagagggtggatatcaaatagtgttgataaaataaaaaaatcaacggaagatttagttaaagactttattaatcagacagcatggtctaccggaactgttgcatttaaaagaaccctttcgggggatgcgtactcaccttcaacaaaatatgcattatatgcttgggttagtagagttgttcaaagagcacgagaaaaaaaaccttcacttggaaatttcgatccaacgacactctctactaattttctgagggatttagctcagttaagttggtttgaaacagggcccttattagctatagaatttctagagaaacatggtattgcagttattattgaacctagcttaaaaggaactaggattgatggtgcagctttaaaggatgtagatggtttacctattattggattatctttaaggtatgatcgtctcgataacttctggtttaccttacttcatgaagtatctcatatttggaagcatgttcattctagtgagacatttttagatgatattgatgttacttcaaatgataaaagagaatccgaggcaaacagattagctagagaggcatttatacctagagctgtttggaaaagaagtgatgcatattcttcaccatcaaaagaaacaattgataatttatccagagaactgaagattaatcctgcaataatagcaggaagaattagacgagaaagtggtaactatcgtttgtttaatgaactgataggtcaaggagaggttagcaagattttagaatcaatcaaagtaaattagtctttaggagaacaaactatgtaccctacgtatgtaccaattcttagagcaaaaacaggcgagtttgatgcaattaaaaatctaaaaggtaaatatgcaagtgcaatttgccctttttttgaaatacctagaattactgaagatacaaaaaaattgaaagatcttagagaatcatctcagttaactaaagattatctaaaattaatagcaaatggaatttccagtgctaattcatcgccatcattattttttgatttttttgattggaaagctgatagttatactgaaactggtgagcatatccttagctatatgtatagagcattaactaagaaaggaataacagtttatccagtaattggttttgatcgatgggatatcttggattaccaaaaggcattagtaggattggatgtaagtgttgaaacaatttattgtttgcgtattgactcagtatcaattgatgatgcaaatgatactaactatttcactgaaatgcttgatgaaatcttgaatactcttggattatcaccttctcaagtaataataatgtttgattttggagatgtaaaaaataaatcaatagtttcaattagtaatgacttaacaaatttactgaatataacaaaaaattttaattttaggaatgtaatgcttgctgggtgctcatttcctatcataattaatgacgcagttaaagacactgattctacagattttgtagtacgtaaagaaatgcatgtatggaagtccatatattctgatttggcatccactataatattttctgattatggtataagaaatccaaaaggtggggatggaattaaagcagtacatgccaatgggaaaattcgttatacaatagagaataaatattttgttgctcgaggccattcaaaacagcaaggtaataaaggtgcacaaatgtatgatcttgctcgcatggtagtaaactcaccttattttttaggagctagctttagttggggtgatgaacaaattgaaaaatgtagtaatatgttaataaaagggaatcctacacaatggattagttttgatactaatcatcatatttcgtatgtaattgaagaagtattagagttccaacgtaattacatcggttcccgtaaactggataagttattagttaaataactgtcatgggatgttaaataaattattggaattgattctatagctaatcgaagaatagcgtatgcatattttgatcctaaatggataaaaaaagagcatagcgtgcttaaactaattagaaatgaagttgagccacttgattatagtttagatatgaaagggtatctaatttgcccgcaatattatgaaccattaattagggtaccagcgggcccttcaatttcaatgatatctaatagtagagatgctttattctggcatttaccggaccaagatgtaccgttctgtttactaaaaagtggtacaatatttggaaaacgttattcatcagaagaggaagcaaagaaggctgtcgaagatgaagaattaattattatcgatggatttaagcaagaacggtctgaaaataaaaattatgatgattttgatagtggcgagtcagaatatgaaagtagcctagaaagtagcgatggtaggttggtagatatacctgtttctagattcaatggataatcttttaaactaccaagcagagtgactagcgtatagtcattatgtgctaattttaggcaaaattattatcgagaaatatttgttgtaaataaatcgggaaacgtactacgttatttattttgtgattcattgaaaaatattaatgatatagatgatgaagttaatgttgaaaatttttattttggtgagatagaatctattgataagcatacaaaatatttgactatatggctaaaattaaggcaacccaaaaggtacgctgattttagagtgtgggtttggaatgaagttgccgtaccacgaggtataattgagggtaaggttgaagggcgtattgttgtattttatgcatccataagttcagtaggaacagggttctggacaaaggaactaaattgggggcaaatagctgtattacccaaaaaatattctgatttttaatcaatgactataaaactaaaaatagttaacgttattataaaatattaaatataatcttaaattactaataaattattaaagaaataaatgtattaactttatttaattaggttagctaactcttctatttccttgtctaactcattgattttaagtgctattttattaaaatgtttcatttgtatatatagaaatctatctttttctatttttgaaaatttatcttttacataatctgctaattttgaactaatatttaaattatgtttttttgtgtaataaatagtatttaaaatacatagttctggtaatggattttcttccaaaacgatatctaatgttttactatctagaaaaagttggaagctactgtcatcattttcaatgaattttttattttgaaaatcaaagagaatagatgaacaattaaaaaaaacagtttgaggtagaatatctattatattagtagtgtttctatttttttgtgggatattttttaacccccatgttaagttagcttgccaaacatcaatgttaatgtcgttaaagtataattttaagccaccaaatgagtttttcttatattgtattttatttttaaatattgaatgaaatttatcaatgtcagatacaacaatatcaatatctcttacgttaaaatttgatgatttatctttatataaaaaataatctctaatgatgccactaaagagaaaaacatcatttttttcctccaacagcacgttgattatttgcttggcgaatttagggaacctatccgctaggtaatcattaaacgtatttgcttgagtattaatgatgtctttcttcataatatttaaattttttgtccactaagtttttgataatgattaattgcaaacaaatctgtcataccagaaacgaaatctacaattaattttagcttaaaatatgctgataaatcaactatatgaaggtcggaaatatctatttttttatccgattcttttatatattcctgtttaacaacattaactaaacttgatgatatcattgattcagctttacttgcatatttttcttttatttttttgattgcatcatggtctttttctttatcaaaacctttaggttcataaaataataaatcaatataataattgaataaaccttttaagacagcatctccagctaactctaaagaaacgatttctctatatgggaaaattatattacaagcaatgcttcgtaatgtttctgttaattcagttagttcaccatcttcaattaactctttattatattcccccatttcaattttatctaaattatggatgaaattttcaagtgatttttcaacaaaaatacctatcaaataagttcttatttcaactatttttttattttctgagcttttcttgttatcgagtatgactttaatatgttcagtgactttgttcattaaagtcggagagtttttattttcggttttttgaagttttttttcaaagtgttcaaagatattattaagggtcattatacctttgttaaatgcatcttctatatcaataacagaataacaaatagaatcagcggcctccattaaataacttaaagggtgacgcaaaggttttttatatttatccattaagccacaatgattatatatttcttctaggtattctttttctgagtgaaagacacccgttttctttgtttctattttcccttttttaggggatgctgaatttggatattttaaataagaggctagtgttgaaaaagtcaaattaagtccatataaatcatcgagagcctgaagtttcgttataactcggaatccttgcgcattaccatcaaaatttataaagtcatttttctgttcattggatattttactagagagttcatatttattatcttcaaataatgctctgaaatagttttgtatcacagtttcaccaaagtgaccaaaaggagggtttccaatatcgtgtagtaaacaactactttttaatatcactgggataattctgtaggtatttttatcaaaaatatcacttattgatctaattttatcttggatttttttattattacaggcaccaattcctagtgaataccctacagacattacttccatagagtgagttagccttgtatgtatattatcatttgtatttaatggaaaaacctgagttttatcatgcattcttcgtaacgctggactaaatatgactcgacctaagtcactttcatattgatttctatcattttctaaattaaaagataaacttgaagaacgcaacctatttgctgataacagtttttcccaattcattactgaattccttttgtgtaatatgttgtgatattatagtgcatcttgacctttttgtaactttactcttttcgttatagagagtcacgatgagtttataagtttacccatagataatggtttgtttttaatgattattaaagtctttatttacagttgatgcgttatgaatatatccaatcaatttatattgagggtataaaaataatatttcaaaatatatagtttaaatttcatgttgttagacttgttttacgagtccggccttcgcaccataagaacatcaatggacgtctttttttttatctgaaatccaatgtttacaaggcttttccccatttttcagtcttcccaagtatactaaggtcaaacctacgcccctttaagccgacaaaccattgatatcttaaaacaggtctattaattctgtggtaatcattcgctagtctttatcgataatgacaatccgagagaaaacacggtaaacaatgcattacgtgtagtgggctatgatattaagaccgaagtctgtgaacatggttttagaacaatggtctgtagttcattggttgagtcaggcttgtggtcaaaagatacagtagaaaggcaaatgcgtcattgcccacttcccctaaaatgacacagctataattaaattttgccccaaaatttcagagaccataatgaaaaaagttcgttttgctaaaactcaaattgtgaatatcttaaagctcgcagattcaggtatggcagttgacgatatttgctaccaaaataggatcagcaatggcatatactaaatttgaaaataaaactatggcgctatgtaattcattaaggttaaccattaaaattgcttgaagagaaaataataatcttaaaaatatttgtagaagtcagcctctaacaccatgcaataaaagagtctttcgcaaaaaaggttgatatggtcattagattttatatatcaccgtttgtattgtaataaccgagccaagatacagtctcttcttgataagagagttgtaaatattgagtgatattggtaaacacttaacatcaactcgctaattctatagcttaaacacttgctctaccatttgattaccattcacaccgctagaaactaataatttcatattatcatcaatactgattgcgcccatatcaaaggcagagtggtgtaatgcgcataatgccaacccattattgatagtacatgggccgccgaattgcttccattttatccaaagcaccgtaaaaccccgtccttcaggtcggggatataagggcgcggttttttaactaacgaggtgtttcctgttgctcaatatactggcggataatggatattgctgcgccaccacaactccccgcgaaataactcggcgaccaaagaacccctttgtagtaatcacgttgggcaatatcaggacgattacgtcgaggtaatcgactcgatacccctttaaggctgttaaccagattagatatcgccagttttggcgggtaattaatcagtaaatgaacgtgatcccgttccccatccatttcaaccagttcaacatcaaaatcagcacaaacactggcaaagtagcctcgcaatttttcaatggcatcctgatcaaatatttttcgccggtattttgtgacaaagaccaaatggacgtgcatcaggaatacacaatgtctgccaaggcgaatattagtttcattttttatagaccaaagtataatagataatatgaaacgtctacaagcctttaaattccagttaagacccaatggtcagcaagagcgtgagatgagacgctttgcaggggcttgtcgttttgttttcaatcgggcattagcacgtcagaatgagaattacgaagcagggaataaatacattccctatacaaaaatggcttcatggctcattgagtggaaatctgacacagagacacaatggttgaaggaagccccatcacaaccgtcacttaaagatttggaacgggcttacaagaattttttccagcagcgtaccgcttttcctcgattcaagaaacgcggtaaaaatgacgcttttcgctacccgcagggcgtgaagctcgatcaatccaatagtcgtatatcattgccaaagttgggatggatgcgctaccgcaacagtcgtgaagtcgtcggagaagtgagaaacgtcacggtcagtcagtcatgcggtaaatggtacgtcagcattcagactgagtatgaagcgacagaaccacaacctgaatcaacctcaatagtcgggcttgatgcaggcgttacaaaactagccacgctttcagacggtacggtatacccgcccgtcagcagttttaaagtcaaccagcgaaagctggcaaggcttcaacggaagttaagccgtaaaatcaaattcagtgccaactggcaaaaacaaaagcgcaaaattcaacgtctgcattctcatattgccaatatcaggaaagactaccttcacaaagtcaccagcgaaatcagcaaaaaccacgcaatgattgtcattgaggacttaaaggtcagtaacatgtctaaatcggcaaaaggtacgacagaacggcatggacggaacgtaaaagctaaatctggtttaaaccgctcaatactggagcagggctggtatgaaatgcgccgtcagcttgagtacaagcagctctggcgaggtggtcaggtactggcaataccccctgcctacaccagtcagaagtgtgcttgctgtggacatacagcaaaggaaaaccgccagtcacaaagtcaattcgagtgccttgaatgtggatatacagcgaatgctgatatcaacggggcacgtaacattttagcggcaggacatgccgtgcttgcctgtggagggagggtgcagtcagaccgcccgtcgaagcaggaacccgccgaggtgattcagatatcagtctgaacgcagtagggatccacgtcctttagggcgtggaggatgtcaaatgagcggcttctaggccaaccacggcgctatcataacgtagattataaccacatatagcacactgataattgtaagcacgtaagatattttttctaaaagtgggatctcggttttggcgaatttcttgtagtggaaaatcaagacggttagcaataacttcttgtacattatcagggaagtgttcacttaaaatctgttgtgctagcttattgattaaacttggcttttttataagaagctgatagctttcttggccaaatccacttaacacattttgctgaattaatttatttttcgatggttgcttattatcttttgatagatcgctctcttttggtagttgcaactcccaaaaaccatcgcgaactaatcgccagaaaggcagatttggataatgctcacggcgagatgggccaaaattaatcaataattctaataactgttgatgaatttcattaccataattaaatagtcgtggatggcctttgcggtactcggaaagcgctaataagagtaacagtggtttatggggcgctctgttatcacctttacgccagatcgtgatattagaattttctgttgtaggattttttgagtatacatgggtattttagataataagtgaatggctgaatgatagcgaatgcgaaagtttattaatatagtcgtataaaatcttattttatagaagaagtacagaaatatgtttaattattcatatctgttataataacattgttttttaatttctttgcaacatcttgatacttaacgtaacaatagtgattttaatgtctcaaacatcttcctcactctattaaatacaatataaaaataaaatggtaaaacatcctctaatcgctcattttttttgattttactattaaaaatggttttatctttattttaaagattctaataggtaaatctgttttattatagaataacaaccattcttacattttgtactatttttagtcgtatttaaaaaaaagcaaataatagactcaaaatatctataagtaaaaatagctaattattctattctttgaaatgcttataagaaagcatttttatgctatggtaatattataagtaatatcatatttgatatatttttataaatatagttattggtggagattatttttatctttaaatttaaaatatatttttatttatacatgcaagtattaattttttaacattacattaactgtaaattaggcttttgtttagataataatctttattaaggtaaattattaaaatttaatacttaaaaaacgcatttataggtatatctatctaagtattgttactaccgatcaatgcttgttttttgatagctgttggctatcgtaatctttttattgatcgtttttatcaatttgtactagaatcatcattagggttacctgtcattgaggggcgtatatgatgatcaatacagtggtagggaaaagaatacaaaatagaagaaaagaattaaatatatcaagttcgaaaattgcattacagttagggatgacagagcaatattatctaaaattagaaaatggttatactaagataaccgttgatgaattaatatgtattgcgattattttgaaagtgtcaccacaaagtttattactaaaatcaactgttagtcagcaaaatagggatagccaattaaataattattatcactaataatattatcacaatagtgctttgttaaaaaatactcatatagtagtagtttattgagtaatatagtaatgataagaaattacttttaggcatctttgatattaaaatataagtatatatctttattgaacgttataaatcaataattgatgatgcatatttgatcgttttaaaatgttttctattactactctatagtgttaatgctttgtttttatagtataaaatcaggtctaatgttaaatgaaatagtaattaaaagtcgtgatagatggctaatcgtcactaaagtgaattaataataaccctctatcttatactgatggcatttaacatcgctgatgcgtttttattttcgctatctactaagatgtataaccgatcttattatttaggatcacagtgatggtttaattattagatttattagtcagttaagccacgatttaataacgtggctttagttttatatgagttatttcgttattggtaaaaactcacgtccataaaaacaatgagttgcattaccacggatcactcggtgatgagctaggtgtcgctggttattaaatgaagcttgctgttgggatagataatgagttagatgccaagcaataagctgtttcgctaattttttattagcatgttggattcgctgagactggatcttgacgctaatgcctgttgcaatatgcgtcgctctgacagctgaactcgttttattaacatgttgtcctccggggccattggcacgcatggtttcaaataaaatttcggtgtcttggatttcttgtggtgggtcaaaataagcgataccgataaaccaatttttgcgtttatgtttaggtcttaaagtacttgtacattgccattgcactgtgcctgaccattgttgtgcgatagctttagcctctgcacctttaagcgatactaatactgactttaaaccataacgagatggctcttgctcaagaattatcacatcaacttgccgctgctctgtgacggttagaaaataattcaatgttttttctaccgctatacagcattcttcggggccttgtgctgaagaaaattgtaataacattatgctatctccccactggttttataagtaataaccggttttaagcgggcgataacctcaattaaaccaagactcctcatactttctataacagtttcaattgatttatacgattgaggcgcttcctcataaattaattgtttattagcacaaataatacggctacctagtgctgtgcgtgagagctgtaatggcgtaaatcgatgtgataaacggcctttacactccgttcgcatccactttctacccgcaccatgtggtagagaatgaaggcttaattcagagataataggcttaacgagataactgtgatcaccacgtgaaccaggaataaccacaatttcgtgatgagcgggcgtcgcccctttgcgatgtaaccatccttgttgattatataattcgcaaggctctaccagattatggttaacatcagtaataaccgttccttgtgtatgaatttgttccatcattctatggccaatcaagtggcgattgagcttagcataattaagagcatggtcatgggcttgtaagtagtcattggcagcgtctgtattcgcgaccaatccttgatggccaaattgctctgtgtgagcacgtaaaatagattgccctaaaccacgtgaaccactatgcaccaatagcaataattgttttttattaataccactgtttgtaaacaatgcttgattaataacttggtcaatttgttggaattcagcaaagtgatttccaccaccaatagagcctaatgagtgagcaaatggatgattttgcatatctgcaggtaaattatctatcaaccattcgatgggcgcgatatcactcatttcgctcaattttttttctattttatctaaattgagtttgctatggttaaattctgtttgaaacagtgtcataccacagccaatgtcattaccgactaaagcagggtaaaaacggttaacagaaaaaaaaaccgctccaatgggataaccacgaccgggatgtaagtctggcatgccagtgacataagccatttcaggaagttgagcggttgttactagttgttggattgctttactttcaatccaagttttatctgaggcgatataacaaacgcgatcagataaataatgaacacacttgtccatattccaatccatatattgtaaaggataaaaaataacgtgattggcggacagtaaaaagaaaggattacttttgagattgtccgcaaagagtattcatatttgttgttgtcatgggatacctccttgcagttctgtgaaatggaaaataataaatcaggcgaatagtaatcactttttttcactttagcaattaaaaaagtagcgtgatttttctttctgtttaccaaaaaaagtaaattagggaacagtgagatttttcttttgggttaataaataattttaactgagctttttcggcaataggcttcgtaatcatctgttaattttctatcggtgatcacgacatcaaattgcgctaaatcgcccatattgcctgtggcagtttcatcgaaggcatggtatttggtgagtaagatcttgcgaatcgatttatccatcgcttttcttttcatatgaagatcatcaatgttgtagcaagagacaccaaaatcgaggtggacaccctctgcggaaataaaggcttttttcgggtttatgttatcaaggtaacaaggctggaggggattataaaatgagtcgcttttagggcgatattcgccaccacacagtagtacggtcgcatttttctttcggcttaatgccaggaaaacgcggtgcgaataacaaataccagtaaagtgtaaactctcaggaataagctcaattaatgtcggaataagttggccattatcaaaaaatagtacatcaccttcagacaccatgcccgcagcaagattaggaatgtgtaattcttgggtttgatccggggtgataatatcactagtcgatgtgattaggttgctatgaggttgtgccaacgcgacaatatagccaccaagcagtgacatcggataggggttttcaacatctgaactgagatcacgacgaatggtcatttcagatacttcaaggatcctcgcggcatctttgagatggatgcggcctgagcgttttatgcattcgctaaggcgacgcaaacgttcatgctgtttggtctctatcacctaaggatccttctattatcgaatagcgtatcccatataacgatacgctaggctattagtaatttgattctggtgcatctgaatctgttacaatcgcaacactggcacttgcaccaatacgtgttgcccccgctttgatcatctttaaggctgtttggcgatcacgtacaccacctgacgcttttacgcccattttgtcaccgacagtttgacgcattaaagcgacatggtgttctgtggcacccattgtactgtatccagttgatgttttaacaaaatcaacaccgacttcgcaacacatttcacaaactaaacgtacttcgtcgtcagttaataggcatgtttctagaataacttttagtgttgtatttccgcaagcggcttttaccgcggcaatatcttgttttacaaaatcaaaacgaccactttttaacatgccaatgttgataaccatatcgacttcttgagcaccttggcgaatagcttctgccgcttcaaatgctttggttgctgttaggcctgcaccaaatgggaagtcgataacacagcatactttaacatcacttccggttaggcaagttcttgctaaagggatataagaagtgttaatacacacagagaagaaaccgtgttcaacagcttcagcacataattgtttgatttgtgcttcagttgtatctgcagcaagtagagtatgatcgatataattagctaatggacgcataatcgtttccttaagagaagattgttatttatcactcatgttagtttggcaacataatagtgagcttttaacgggataacaatcacaaatgatatttaaataacatgatattgttatatatctatctaaatgtaactattctaacattttaactttttcattagggtgagaggggcactatggatatcgcagtgattggttcaaatatggtggatttgatcacctatatagataggatgccaaaagagggagaaacccttgaggcgccagcatttaagattggttgcggcgggaaaggggcaaatcaagcggttgccgctgcaaaattaaattctaaggtgatgatgttaaccaaagtgggagatgatattttcgcagataacaccatcatgaatttagagtcttatggtattaatactcgttatgttgaaaaagtgcccggaaccaccagcggtgttgcacctatttttgttacctctcaatcatccaatagtattttgatcgtaaaaggcgcgaatcagcatctatctgctgaagatatcgatagagccgcggtgagtttaaaaaaatgtcgtatgattgtgctgcaattagaaatcccgcttgaaacggtctatcacgcgattgagttcggtaataaacatcatattccagtattgtttaaccctgcaccagcatcgaaagctttagatctcactatcgccgcacaatgtgatttttttgtccccaatgagacagagctggaaattttaacgggtatgccaattaatacgttggatgaaattcgagaagcagcctactttttactcgaaaaagggtttaaaaatatcattgttacattaggtgaaaaaggggcgttatgggtgaatggggaaattgagaaatatatccccgccattgaagttaatgccgttgataccagcggtgctggagatgcttttattggctgtttttctcattactatgtgcataccggcaatattgaagaagcgttaaataaagcggttatgttttcgggtttaagtgtcacaggaaaaggcactcaatcttcttatcctagtattgaagaatttagcgaatttttaagctcagcaaaatagccatcaatgagccatacctctcacagctctcctgtttaaaatcaggagagctttattatcaataagttatcttttttacatcgcgttaagtttgtttttagttgaatgtttttacggtattgtgattttgttcacaaaatagtcatcaataagattgaattaaaatttcattatatgtaattttaattgaaatactatttcattaaggttattacaatgaaagatgatgcattgagtttatgtcttcaaaatgaaagtaaccaagagaccacacaattttctgagctaagtaccttagcgttagtttcgttaattaatagtgccgatatcaccgtggcctatgccgtaaagaaagaattacccgcaatcgcgaaagccgtagacaaaatttgtgaacgtctacgtcaagggggacgcattttttatgtcggcgcaggaacaagtggccgattagcggtattagatagcgcggaatgtccgcctacttttggcgtttctccctcactggtacaagccattattgctggtgggcatgatgctatgcttcaagccgttgagaatattgaagataatcaacaagctgctatcgaagagttgcaacgccgtgaggtaaattctaacgatgtcgttattggtatcgctgccagtggtcgcacgccatttacagtggctgcattacagtatgcaaagcagatcaatgcattaacgctctcaattactacccgcggtaaaggtatgatgagtgaaatagccgatttatccatcgcgccagatgtcggcgccgaagtgttaacaggctcgacaagaatgaaaagtggcacggctcaaaaaatgatcttaggtatgctaagtaccagtgtaatgactcgtttaggtaaggtgcataaaaacctgatggtcgatgtcgtggccagtaatgaaaaattacagcgacgtgctgaaggtattgtgagtgaagtgtgtgggatcacaacacaaaaagcagcggagttattaaaaatggttaattatcatccgcgaaaagccattttaatgtatgagcttcatctgagtgtagagaaggttgagcaaatgacacaacgctatccttaccactctttacaacaacagttagctctatttaatgaataacaatatcagtcaatcctctgaactctagcaggcacaattatggctaataaaatagaacatctcgacaccttagcatcagaaatagaaaaacaggctggtgggtttagcaatatcgcaaccttaacacattgcatgacccgtattcgtttgatcttaaaagatagttcgctatttaataccgaagcattaaaacaagtcgaaggtgtcaaaggcgtggtatttaatggcgagcaacatcaagtcatagtaggaatgggaacggccgccaaagtttattcaatcatgaataaacgtatgcaaaaaaacacagataatagcgaagaagcccctgcgtcaacaccagtgaaaaaagggttttccatacgccgtatgctaaatacgttggcggctatttttgttcctactatcccagcattaattggctgtggtttaattatggggctaattaatattattcgtttagtggcacccggcttagttgatcagtttcctgaactctttaagctatttaaactgatcggaagtaccgtatttgcttatctctctattatgataggtataaatacggctaaagagttaggggcttcaacctccataggtgctgttatggcgggattattagccatgccgggactggctgatatcacattatttggtgagaaattacagcctaatagtggtgggatcttcgcggtcttaatggtggtggtattttcttcaaaattagaactatggtttcgcagtattgtaaaagagagtcttgatcttattttaaccccctttgtcactattttagtttctgcgttagtggcaattatggtattccaacctataggtcattatctgaatcaactattagcgcaaggcgtatccttatcactattaaatcatggtggcggtgcggttgtgacaggcgcagcgttagggggcagtttcttattcttattactaaccggtctacaccaaggtttaataccgatccacactgaaattttaaatacctttgggttaaattacctattccctattttagcaatgggcggaatggggcaagtaggctcttgtttctgggtttatttacgtactaaaaaccaacgcttaaagaaaacgttaatgggtgcgttgcctgtcggaattttcggcgtgggtgagcctttattatttggtgtctctttacctttaggtaagccctttattgcaggttgtattggcggggctgcgggtggtgcattaatggcttattttcaggttgggatcattattccatttggtactgctgggttatcattaattccactggtgggggatgggcagatcatcaaattccttatcgcagtattgggggcttgggttgtcggttttattgccagtatattaatcggatttaccgatccagaaaaataagtcagaagaagaaaagaaaaaggataatagaatgtcaacactgactaagaaacttgaaaatttgcgcttacaaggcaaagggacagagcaacgtctcgcccactatttattagaaaatagcgataatattgccagtatgaatgccgcagaattggcacaaaaagccggtgtcagtagtgcttctgttatccgtttttcccgccaaatggggtatggcggttatcctgaatttaaaattgattatctctcagaggaaaaacaacaaaaaagcagtagtgatattctttatgccaatttagccaaaacagactcgactgagcagattattgctaaaacaggacatctatttactaccgccattcaggattcgatagcgttactggatgcggcgacgatagatttactcgctgagaaaatgatcagcgctaaacggatcgttttatttggtgtgggcgcatctgcgatcgttgcgagcgatatcttccataaactgatccgagtgaataaaaacaccttatttagtgcagatctccatgcgcaacttgcttattcagcgaatttatccgcggatgatttggcgattgctgttactgcaagaggcaatactgcggatattaatcgaatgctgaaagcggcaaaacaagaaggctgtatcacagtggctttaacacgttttgggcaagatgaagctacgcgcttagcgaattacacattaccttatttttatgatgagcaacattcacaattgggggtgatcacaccgcaagtattgcaaatggtcgcttttgatgtgctgttttttaaatatatgacactggcaaaaggctcagcggaaaaagcgctattaaaagggcgacaagctgtaatgcaaggaaatcaataatgttatttatcaccatattagctgttggtgcggcgattggcttaattattagcacaacgggggtaggtggtggtgttattgttttacctatattaacgtatttctttggtatgaatgcattaatggcggtggcaaccgcaaatttactttcaatgttgatgaaagtgacatcctcatatatgcatttccgtttggggaatattccctttaaacgagccatgatagtcctcggcattatgttgccaagtacttttttagcgagtttactcgtcaattatttaggttcattaacgcaatatcagcagcaagttgagtgggggattaatgcgctggtggtggctgccattattttttctctctttttgtttattcaaagaatgtttttttcttcacctgtgatagctaaacagataaccccattagcgcctcttaatattaaggcactgttattgccggcgattgcagcaggtgttgttttaggtgccacaggggtcggtggtggtgtggtggtgttacctttattattgcgttacgccaatctatcgataaaacaagcgataggtacttcgatttttacgaccactctattatcaggctcttctgcattggcttatatgcaagatggccataccgatatccatttagcattgttgctgtttcttggctctttgatctctattcctctatcaaaatggctattgattaaaatgccggatagggtatttcagtatgcaacgttgtttttaattttatgcagcgctttcatgatgttggcgagattgttttaactgatagccatactatggcattgcgtcgattctttattcttggttggtgtttttttctggttttttatgctgttacaacacggagttactacttggattaacaagtgatctagctctcgttttgagcggtgataaaaaataaactgaaaaaaaaggttgttaatttatagaagttatgtttttttagatacagataacagacaaacacatcattacattaattgataggtaacccatgatcatcactactctactacaaactctacgactaacagcgcacatcgcggctgtggttgttgtgcgtgtggtggtggtcgtcggcaaagcgccgtaacgggtccgaatcaacacagtttcgcaaccccgccggcgtattaaccgggcggggtttttcatatctaccgcccataaagtccggcttagtaaaaaggacacagaacaatgggtgctcaacaagataatgccacaggaaaaaccttcactggtgcgcaattaattgtttatttactggaacggcaaggtatcactacggttgcggggatccccggcggagccgctcttcctttgtatgatgcattaagccaaagtcagtctattcgccatattttgacacgtcatgaacaaggggcgggttttattgcccaaggtatggctagagcaaatggtcagcctgcggtgtgtattgcctcaagtggaccgggggcgacaaacttagttacagccattgctgatgcaaaattagactcaattcctttggtttgcattacggggcaagtctcttcagccatgattgggactgatgcgtttcaagaagttgatacctatgggatgtctattcctattaccaaacacaactatttagtccgcgatatcgcacagttgccggaaattatctgtgatgcgtttcgtttggcaatgtcaggtcgccctggacctgtatgggttgatgtacctaaagatattcaacaagcgactatcaccttagataaattgccaccgataccacaaaaagatgcagctccagcctttaataccgatttggtgatccaagccgcgcaaatgattaaccaagcgaaaaatcctgtgctttatttagggggcggtattattagctctgaagcgtgtaaagaagcgattgaattggcggagaaaaatagcctacccaccacgatgacgttaatgggattaggtttaatgccaccaacacacccgctatatttagggatgttaggtatgcatgcggcacggagtaccaactttattttagaagaagccgatctgctgatcgtattgggggcgcgatttgatgatagggcaattggtaaagcagaaaagttttgccccaatgcgaagatcattcatgttgatattgatagggcagagataagtaagatcaaacgtcctgatattgccattcatgcagatgctaaagcggtgctgtcgctgttattacctttaattaatattaatcagcgcaacgaatggatagatagagttaataccttaaaacaggaatatcccttagaaatgaaaaactcacacaatattcttagcggttacggcatcgtacttgctgcggcaaattgtgttgatgatgaagcgattattaccaccgatgtagggcagcatcagatgtgggttgctcaagcttatccactgaatcgaccgcgccaatggttaacatcaggaggcttggggacgatgggatttgggttgccggcagcgataggggccgcattggcagagccaaataaaaagatcctctgtttttcaggggatggtagcatcatgatgaatattcaggagttagcaacagccgctgagcatcagttagatgtaaagattattttgataaataatcaagcattagggttagtacaccaacaacaaacactcttttttgatgagcgtatttatgccgcagcctacccttatcaaacggattttattcgtattgctcaaggatttgggttggatacttgtgatttaaatcaagaagcagatcctcaggcggcgctacaagcggcaattgctaaacctgggccttgtttaattcatgccatgattgatattaacgaaaaagtatttccaatggttccgccgggggcggcaaatatcgagatgataggagcttaatttatgtcactacaatcacaacctatcgcactagaacttattgttcgtaaccatcccggtgtgatgacccatatttgtgggctatttgcgcgtcgtgcatttaacgtcgatggtattttatgtttaccaatgaaaaacagcgataaaagtcgtatttggttattagtacaaaaagatgagcgtttaatgcagatggtgagtcaagtggaaaaacttgaggacgtaaaagaagtgcgttttagtgatgatctgcgcgtttttgaacagatggaaagttatttaaattaattgcactgtttgttctggctctttttaggtacgagagagccagaacctaaatatctaatgatgattatcttccagatgttgtttatcctcgctttccatctgtaaggtaatatgattgatatgaaattgttcacgtagttgcttatcaatagcaaggcgtaatgtttcactatctacattgggttgatagacaatatgaccactgaggatcaacttgctttgcgtcagtgcccataaatgcaaatcatgggagctagccacccctgcggtattattaatggtgtctgttacctcagttaaattaatgcctttaggcacgccttctaataaaatattcaggcactcttttaataagatccatgtgcgcggaaagaccataaagccgattaataccgcaataatagaatcaactaattgccaaccggttagccaaataattaccgccccaataatgacgcccactgagcctaacatatccgcccacacttcaagataagcccctttaacgtttaagctttcatcttttgcactggtgagcattttcattgagataaaattaatgataagccctgcgattgccacaacaagcatacccatagactgaatgtcaggaggggaagagagtcgttgataagcctcataaagaatataaaaagccaccgccattaagatcagtgcattcatcgcagcagccaatatttcaaaacgagcatagccataagttctgaatagatctgctgcttttctacctgcgtggatcgcgataagagcaagtaagagtgcaaatgcatctgtcatcatatgcattgcatcagaaatcaaggctaaactttctgttaagtagccaccaataaactcaatcaccataaaagagcctgttaatgcaaaagcaattaacagacgtgattcaggtagcgctttgacatcaccgtgctcgtggcctgcacccatgctatttatccccgccattattaataatacttagaataatagtttaaatggcggtgaaatataatgggtatttgtcttaagggcgatgatgatagtgttgttgattggggctagacatgataactgatgcacgcatatggccttctacacaaatataagagtgtggcgcattaccatgaaaggcataaaaatcgccggtttctaataatacggtttcatcgttagcaaaacgcatcatcagtttgccagaatagaccataatatgctcttgggtgccgtcggcatgggctgggctattaataattgccccgtgcttcatctcaatatgccaaatttcagtaatattgccgatgccaatacggaatttaaattcttgtgcatagtcgccaacgataggcttatgtcgctctaagcgaggatattcttcgcgggtaaaactaaataaatcacctaatggaaatccaagggctatcgcgatagcttctaaggtatcgatgcgaggattagaatcgccagactctaatttggacaatgccgctttagatatgcctgattttcttgataactcattaagtgacaagtttcgagattgtcttaactgcttaaccttattaccaaggtattcgtttgtctttttcggtgattgtgggttcattgccaattcaaaatattgtcagtttaaaagtataatttcctgtagatgataacatcaattcttcacagacgggaaaagcacagactatttagacaatattttgtgaacagggtgcgcgtatcaggcgatattttaaagcatgtttatctatttcttatcccctataataaggcaatattttccattcattcaatattcactatgatgaggtttctacagcgtgtagaaacaaaataatatgttgcaacaaaattatcgtcagtccgagctttttgctattactactattacagtcagtattgcggtgatagggattgttattggattaactattccgatggtggctttacggctaaacttggcggggatcagtgaatctattattggtctgatttcagccgcacctgcgatgggaatgttaatcatctcaccctttgcacgctatattgtgcaatggcttggtaaacgtttagcgatgttattagcaacgattatatcagccattagtctattgcctttaatggggagtttgccattagaattcctgttcccattacgactaatcaccgggattgccagtggtgtgatgatctgtttgggggagacatggatcaatgaacttgtagcggataataagcgaggtcgtattttagcgatttatacgaccgtgtttactatcagccagttgttaggcccttcaattattgcgttatatggcgttgctgataaaacaccgatcttaatcagcgtactgcttcatattatctctatcgtgctatttttaatgatggatcagaaagtgggcgataaattagctaaagactcagaagagtcgcacttttctattcttcgttttattaaagtggcgcctgcgatatgtggtggcattatcttttttgcattttttgatggcacagtgttgtctatgttccctatttatgggctaagtgttggtcatagtgaagcgattgccgcgatgatgatcagtgctattttggcgggagatgccataatgcaaatgccatttggttggcttgctgatcatatgaatagaacacggctataccgaatttgtggtgtcattacattattagcaagcttattattgcccattgctatgccacatactttagttatttggccactattattagtgcttggtgcaacggcgggagccatttataccattgcattggtacaaattgggcaatacttttcaggaaatgatctgatgatagcaaatgcttcagcggcgatgttatggggcattggtaatctttctggtcccattttagccggtgctatgtctgaaatctctccatctgcgttaccttttttattggtggttatgacgggattatttttagtttcgacgatggatcgctttaacttgcatgtcgacactctaaatcgtcatacatcataattgcatgctcttttttaccttattgtaggtaaaagagggcgctattttcattaaattagacaataatttcctgctgttttatcacccattcaattattttttcttttattatctttattttaataatcaatgcgatacatactattcaaaggtttttattggtgatttattaagaataatccagaaataataaaatgaaataagaaagatttgccaaatggcactattttcatctagttttatcacaaggaggtgtatgtttttcaagcagagtgtgatgaatactgagtcaatattatcgccaaacaagggaagatgctgttaaaacagtaagttcaaaaatgataaaaacataagaaatatttaattaatatttatagtatcaaaccaagcattattaatataaacatcaatgatattaataaaaacagttgattataagtacgcttcaccttttagggtgatagcgttgctaaaacagtttaaccagaggagaaatatatcactattctcctcttttcttttttctgcgaacactagaatgtctttttatgacatttttgctaaaaaagtattttttttcttgattcttaccctaaaagcaccagataatcgtttgcgtcaaattctctcactctatccacattaataaacaaacgtttgctttttcactcctctgatgatttttttaccattggaggtgataataattttagacgtaatcgttttcgttggggagggtgaactgttttttatgtcagaggaatgtaatgtctgctaatcaatcagcaaccacaggtaaactggataattattttaagcttaccgcccgaggcactacggttcgtaaagagatgatcgccggtttaacaacctttttggcgatggtctattccgttattgtcgtacccagtatgctagggcaagcggggttcccccacacggcggtatttatcgcaacctgtttagtggcaggatttggttctctgttaatgggattgtgggcaaatctacctatggcgattggttgtgccatttcattaacggcatttaccgcctttagtttggtacttggtcaacatatctctgtacctgttgctttgggggcggtgtttttgatggggtgcctatttaccctattttctttaacagggatcagaacgtggatcttaaaaaatattccgattggtatcgctcatggcgccggtattggtatcgggctatttttacttttgatcgcagccaatagtgttgggttagtggtgaaaaatccattagccggattacctgttgcgatgggagaatttacttctttttcagtattaatgtcattggccggtcttgctgctatttttggtctagaaaaacgtaaagtccccggtggtgtgttattagtcattattgcgatttcgattattggattgatttttgatcctaacgtgaaataccaagggttctttaaaatgccacaattaggcgaagagggccttgcactattatttgccatggatattaaaggcgcattacaaccacttgttttacctagtgtattagctttagtgatgacggctatttttgatgcgacaggaaccattcgcgcagtggcgggacaagctaatttacttgataaacgaggacaaattatcaatggtggtaaagcgttaacttctgattccgtgagcagtatatttgctggggcaattggtgcagcacctgcagcagtatatgttgagtccgcagcgggtactgcagcaggtggtaaaacagggctcaccgcaactgtggtcggtattctctttttattgatcctctttttatcaccgctatcttatttagttcccccctatgcgacagcccctgcattaatgtatgtgggtttattgatgttaggtaatgtcactaagttagattttagtgattttgtcgatgcgatgtcaggtatggtgtgcgcggtatttatcgtattaacgtgtaatattgttacaggcattatgttgggttttggctgtttagtgattggccgtatttttgccggtgagtggcgtaaacttaatattggtacagttctaattgctattgctttagtggcattttatgccggacactgggcaatttaattaaaatcatcaggtttaaacataaaaagcggaatatatttttattccgcttttttgctatttatttatctagttttattcgctattgtcgaggttaagactcattgttaattttttggtaaaataaatgcatcagatagaaatacgacatggtgagcctgaagatgctatagcaatacagcaattgtatacacatccagacttatatatttgtacttgtcagttcccttatccatcagtcactatgtggaaaaaaaggctaattgaattttctgaacaaaatattccacattttgttgcttcttttgacggtcaaatcgcaggtcatttagcgttgatcatcgacaatcatcctcgtcgtcggcatatcgtcagctttggtattggtgttggtgctgagttttcaggaaaaggtataggtaaagcactcattaatacggcaattgattatgcttttaattggttggctgcaacacgtatcgagctagaagtttatgctgataatgaaagaggccttcatttgtataaaaaattaggttttgaagtggaaggcattcgtcgtaatgcagccttcagagaaggtaaatattgtgatgttgtgatgatggctcagctaaaaaatatcgaataactctgtgggggcttgacgctgttttcatttttcaatgatagagcctattttactttttgatcctcttaagagtatgactagaacagaaaacagcaataacagcatactttttctctttctgatgccgttaatagataacactatgcattaatatgttagcttttttgtaagatacgattaatcttaattttatatcattcttcattagtcgatgtgggttcagtttaaaataggaaaggtaaagataggcatggtagataaacttttatgatgcgtttctttatcattcagcaagggttcttttcatatcaggaaagatggcagattcttagataaaaataagcatgtaagggtagcatggaaattttctttactattttaattttaatattggtagtttctgtttcaggtgtcattaccaaagttattccttttcgcattccattaccattaatccagattgtgatcggggcacttttggcttggcctcagtttggtttacatgtcacctttgatcctgaactcttcttagttttactgatccctcctttactttttgttgatggatggaaaacccccacacgtgaatttatccaaaatggtcgagagatctttatccttgtgctggttttggtgatggtgacagtagtaggtattggttaccttatttactggataatgcctagtattccacttatttctgctttcgcgctcgccgcggttctctcgccaactgatgcggtggcattatcctcgattgtcggtaaggggcgaataccgaagcggatcatgggggttttagaaggcgaagccttaatgaatgatgcttcgggtctggtggcgctgaaatttgccgttgctgtggctatgggcacgatgatatttaccgtgggtggcgcaacctttgagttttttaaagtggcaataggcggtttattagcgggtattgcggtaacgttagtctatagtaaatctctgcgattgatgagccgttggagtggtgatgatcctgccactcaaattgtctttatgttgctgttgccttttgcttcttatttgattgctgaacatattggcttttccgggatccttgctgccgtggccgcaggtatgactatcagtaaatcaggtgtgatccgcaatgcaccattggcgatgcgcttgcgtgcagatagtgtctggtcaatgttagagtttgtctttaacggactggtctttattatgctgggtttacagcttcctgttatttggacaagctcggttattcaagctgatctcgatcctgaagttgaagtatggatgctgtttgccgccgtctttgttatctattttgcgttactgattttacgttttacatggttatggctaatgaagaaaatcagccatctctttatgaaaaaacatccccttgatttcgccacttatacgacgagagaattatggctatcttcttttgccggggtacgtggtgctatcaccttagccggtgcgctctctataccgctatttttaactgatggcagtactttccctgggcgctatcagataatctttattgcggcaggggtgatcctgttatccattttggtcggtattatttcattacctttcttactaaaagggattaaagctaccgataaagaagcggataaaaatgaagtacgttatgccaagaaagtcatggcagaagtcgctattgttagcctcaataaaatggaagagcgtttagctgcaagtacagaagagcaactagatgcggaagaaattaatgaagtagcttctcgagttgccggctatttaagacgacgtaccgcggatcaggacgagatgatgcacaatatgttggtggaagatctggaaagacgttttcgcctaacggcattgcgtgcagagcgtggtgagctttatcacttacgtgcaacgcgtaaaattagtaacgaaacactacaacttttgcttcatgaattagatttaatggaagcgctgttagttgagaaagacagttaattatgtggctactggttattacaacgttgttatgggcggcttcttttagtctgattggtgaatatctcgcaggtcaggttgatagttggatctcagtattgattagagtggtgttagctgccatcgtctttttgcctttcctacgttggaaaggcattcgccttaaagtgattttattgtatatgggagtaggcgcatgccaattgggtattatgtacctgtttgtgttccacgcttataactatttaaccgtagctgagtttttactctttactgtattaacaccactttatgtcaccttaatttatgatctacttgaaagacaacgtttacgttggggctatgcctttagcgcactactggcggtattaggggcggccattattcgttatgatcatcttagtgatgacttctggctgggattattattggttcagttagccaatattttcttcgccataggacaggtaggctataaacgattaatggaaatgcatccacttcctcaacatcacgcattctcttggttttatatcggggcggtggtggttgtgttagtcggctcgttatgttttgccgattggcaaaaaataccgaccacatcgttacagtggggggtattgctttggttaggtattggcgcttctggaataggctattttatgtggaactatggggcgacacaggtagatgctggaacccttgcgattatgaataatatgatggttccagcgggattattagtgaacttctctatttggcaacagcaccctaattggccaagtttcatcataggcgcgagcctgattgttgcatcactttggttccatcggcgttggatacaccaacctgttttacaaaaggcagatgattaacggcatgttgacctgctaagcgtataaactctcgtattgccggttgatgttgctcacctgtacggttagctgcatatagccggctccataatccttctcctaaggtctttgtgaccactaatccttgtttttcaaaattctctacggcccagtgcggcagtgccgctatacccattcctgctgccaccatttgaataagaagtaaggtgttatctacatgtttaaaatgtggcgtgatccctgcgggctgtaaaaaatgacgccaaatatcaaaacgctctctttggacaggatagataaacagtgtttctgagatcaaatcttgtggttgaatatgtaagcgattagccagcgggtgatcaggagacaacacaagcttaacttcataatcaaacaacgcggtatagtgcaggcgttggttatccaagatatcagaagtgagtacaacatctaattctcgttgtaataaagccggttgaggatcaaaagtgacacctgaatggaagtcgacattcacatccggccatgtttgacggtattgctgtaatgcgggtgttaaccattgaatacagctatggcattcaatagcaatatttaaatgagcattacccggctcattacactcttctatcgctcggcgcacaatgggtaggacttcttgcgctaatcttaataacacttcgccttgtggtgtaaatcgtagtggttggcttttacggacaaaaatacgataaccaagacgatgctctaattcactaaactggtgagagagcgcggattgtgtttgatgtaactgatttgccgcattggcaagagagcctgtttgcttaagtgccaatatcgtttttaagtgttttatttctatcatgagaaaccttcaggttgtgaatgaaaaatttgcgcttgtggtttatacactacctgtagattatggatgtgtaaacatctagacggctaaaaacaggattttttattatgacaattcgcaatcacacattaggtttcccacgtattggcttaaatagagagctaaaaaaggcacaagagagctattgggctggtaatatttctcaggcagaacttctggcagttggtaaagaattacgcgctcgtcattggcaacagcaagctaatgcaggagtcgaattattacccgttggcgattttgcttggtacgaccaagtcttgggtactagtctcctattaggcaatataccgccacgccatcgtaatgaagatggtcgcctagatcttgatactctatttcgagtggcgagaggcagagcaccaacgggtaaacctgcggccgcctcagaaatgacaaaatggtttaatactaactatcactatatcgtgccagaatttcagcaaggacaatcatttacactggcgtggcaacagctactggatgaagtcgatgaggctttagcattaggccataatgtgaaaccggtacttttggggccgatcacctacttatggttaggaaaagttaaaggacctgagtttgatagattgtcactgttagacgctattttacctgtttatcagcaagtattgagtcagttacagcaaaaaggtatcgagtgggtacaaattgatgagcctgcactggttcttgatttacccattgagtggcaaaatgcttatcaagttgcttatcaagcattgactggacaggttaaactattattgactacctattttgatggtattactcatcatcttgatattattaaaaacttaccggtaaatgggctacatattgatctatgtgcaggacaggacgcattgcaagttatacaccaagcattgcctaaagactgggtgttatcgttaggggtcattaatggtcgcaacgtctggaaagcggatctaactacccgttatcaacaagtagttgcattaaaaggtaagcgtccattatggattggcacatcatgctctttgttgcatagtccaattgatttaagtgcggagactaagcttgatgatgaagtgaaaagctggtttgcctttgcggtgcaaaaatgtgcagaagtggcgttactcgcaaaagcattaaatgcaccagaaggtgaatatgacgaacaacttgcccaatacagtgcccccattcgtcaacgtgaacactctagtcgtgtacataatgcaaaagtggccgcacgcttgcaggcgattaatgcacaagacggtgaaagaacatcgccttatcaacaacgagctaaagtgcaacgcgctcggtttaatttccctctgtggccaacgacaaccataggttcattcccacaaactaccgagatccgcacagtacgtttagactttaaaaaagggcgtattgataccactgcttatcgcactaatattagcgagcatattaagcaagccatagatgaacaagagcgcttagggcttgatgtgttggttcatggtgaagctgagcgtaatgacatggttgaatattttggcgagcattttgaaggttatgtctttactcaaaatggctgggtacaaagctacggctcccgctgcgtaaaaccgccggtgatcattggtgatattagccgtcctgcaccgattacggtagattgggcgacttatgctcaatcattaaccgataagccagttaagggtatgttaactgggccagtgactattttatgttggtctttcccgcgtgaggatgtcagccgtgaaactatcgctaaacaaattgcgttagcgttacgtgatgaggtggatgatttacaaaaagccggtatcggtattattcagatagatgagcctgcattacgcgaaggattaccgttacgtcgtgatgagtggcaagcatacctagattgggctgttgatgcctttaagctcagtgcagctatcgctgatgatgagacacaaattcatacacatatgtgttattgcgagtttaatgacattatggaggcgattgctgcattggatgcggatgtgatcaccattgaaacatcacgctcagatatggagttattagaagcctttgaacattttgattatccaaatgaaattggtcctggggtatacgatattcattcgcctaatgtaccgaatgtagaatggattgttggattgttaagaaaagcgcaatcgcgtatccctgcggaacgtttatgggtaaatccagattgcggtttaaaaacgcgggggtggagtgaaacccgtgcagcattggcaaatatggttgaagcggctaaatatttacgccagaacgtataataatatttaaataatatattttagtagcctgttattttgatgttatcaatataataggctatttttttcttattaatcaaaaatgtttattaataggtaaataaaaataagagataatcttattattgatattttttaatattgctatactgcacaaaacttaattttatggatatagatattgtgcaaaatggtattcacctgtcagaaaaaatattaaatgcatttcctactcgagccttaacattatctccattaaaaggggatggcggtttattccgtaccttatttttagtgattgcaatgttagggatgacagtatttagtgcttatcaaattcctaatattgtttatgattatcaaattagtaaaaaccccgtatttattgatgccgatgttgatggctcttgccgttcaaaactatttgttttaaccaattgtagtgttgacttacgttataaaggtaacgaggtttcacgaaattttacttttcttgattttggcaataaagatatattggttgagccagtagcagatgaaaacgatctgactaaaatgaccgtcgatgtggcaattgataatatttggttacgcttaattagtgcattagtttttactgcattatttgctttttgcgtgatctttttcatttatcgtcaaatgatcagcaataaagtcaaaaaagcattgctttcagtaggcaccaaacctttaaaattaacggctatccccgctaaggtcgttgtgagtaataaacaatttattgctacttataaaaccaatgttgccggaaaagagacttcaattacttattcaggtaataagaaaacgccacctattacattagaaatggaaggcaaaacttatgttttggcggtgtacgagccacaacaaaatattccttatgtcttagatgttcctttagctcgaattcaagcaacagaagaagaaaaacaacgttttcatgaggcattaattgaggaaggtattctctaattacgctttaatgcagtgatgagagcgattgattatagaaagcaagatggctattgcgcttgattggttaagaaacaatagcgccatagccatcattcaatttattagccaccaaagatttttgctttaagtatatccataccggcgctcattaaatctaactctttggggataacaccttctggcgtgagtttatcaaccaattttggcaaatattgtgctgccatatcagaggcttcagcggtattcatattgatctttgccgccaattcattaatcactggcgatgaaaaaacttgtacgatttgctcggcattaataggtaaattactgcctgtgctaatccaagattggatcagttcacttaatcctgcgctattaaactgtttaaccaagccttcaattcccccttgggtttctacccattcgagtactgttttgaattgattaattttctcaccgcccaacaggcttgcgatttggttaaataagctcatgcttgctccaataactatcaacgcattattacgttatattgagatgttaattttaaaggcgagtagtgtacgtgaagttagtatcttcatctatactcaagtgatatttatccgactaagcaagaatagaatgcaggattttattacgccaaagcgatattgataatgccgccatagcgtcgctattcgacactgttatttgtgataactatcacgtttttatgaaattgttactttttttattacctgacaggtgacgtcaatcactaaaaaggtctaaaaaactgataaagtaacacttaatttaatgaacattggttttgtcccattgaggagtccgatatgtctgatgtatttcacttaggtttaaccaaaaatgacctacagggtgccactttagcaattgttccaggtgatcctaagcgtgttgaaaaaattgccaaattaatggataacccagttcatctggcctctttacgtgagtacacctcatggcgtggtgaaattgatggaaaagcagtgatcgtttgttctacagggatcggtggtccatcaacctcaattgcagtggaagaattagcacaattaggtattcgtactttcttacgtattggtacaacgggcgctattcaagagcacatcaatgttggtgacatcttagtaaccacagcagcggttcgtttagatggcgcaagtttgcactttgcaccaatggaattccctgcagtgtctgactttgaatgtatgaatgcactgtataaagcggctaaagacaatggttcaacggttcacgttggtgttacagcctcttctgataccttctacccaggccaagagcgttacgacacctatactggtcgagtcgttcgtcgttttaaaggctctatgaaagagtggcaagaaatgggtgtgatgaactatgaaatggaatccgctacattattaaccatgtgtgcaagccaaggcttacgtgcaggtatggttgcaggcgttattgttaaccgtacccaacaagagatccccgatgctgaattactgaagaaaactgaaaataatgcattaggtatcgtgattgaagctgctcgcactttaatgaaataagttttctaaatgaaatactaaagcctttaatacattggtgtattaaaggctttttttgtgcggtaattcatcatgttaatatgtcaaccgtcatagatttctgttaaggtcttgatggtcttaacaatacaacaatgagaagaggcattatgactgatatcttacaaacacatccttcggtgttgcctttaacaggtgggattaactttcgtgatctagggggaaaaaagctcagtaatggcggtattatcaaacccggcttactctttcgctccggttcactggatagattaacggataccgatcaagcgcttcttattgataaaaatctttttcaaatcttagactatcgtgacacaggtgaaattgttgataagccggatcgagtatgggaaggggcacaatattaccatgctccagctaatccattatcgaaagaagtgtcagctaaccttgaaaaactcaccccagaaatactggaacagtttgatgctaaagcatttatgtttcagctatataaattactacctattaataatccggcttataaacagttggcaacgttgttgaagcaaccagaaaaaggcggtgtcatacaacattgtgcagtaggtaaagatagaacgggggtgggctctgctttagttctatttgccttaggggcctcattagatgtggtgatggaagattacttactcaccaatgaaacattagcgcctttccgcgcttatcttttagaagagcatgctaaaacactgagtgaaaatgtggtgaataaatttgcgtatgtttattcagtacaagaagagttcctgcaaacagcccttgccagtattaatcaacactatggcaatatcgatacttggcttgaaaaagatattggcttggatgcgcaaagtagagaaagcttacaaaactattttctcgaatagtgaagtgatttatattcggttaaagatgttgtgcttttttactgaaattaaccgaatttaaggtctctattgtgacagtacaagacattatccataccatcactctgtttgtaaaagagcacgaaatatgggctgtgcctatcgtgttcttactggcatttggtgagtcacttgcctttatctcgttattaatacctgccactgttatcctattaggcctaggagcattaataggtgaaagtggtctactcttttggccaatttggcttgctgccgccctaggcgctttttttggtgattggatctcctattgggtgggttatcactataaagaaggggtaagaaacttatggccgatttctcgctcaccgcagaccttggtaagagggcatcaattttttaatcgctggggtgtttggggggtatttattgggcgattttttgggccttttcgggcaatagtgcctttagttgcgggtatttgtgctatgccacaacgctattttcagttggcgaatttggcttctgcgatgatctgggcatttggtattctggctccaggggcgtttggcctgcaatggctggcgaaatggataggataattgcgtcctttatcgcaaatcagcgtatgatgtaaattgttgctagacaatgttactgatgcgttttaacgtagcccgctagaaaataaaaaggttacttgagtggatattcagttgttatacgggatcattggtttattaggcggtgtattggtgggggggatcgccgtttggtggcttatccaacaacgcttagccgaaaaagaaaacctattacgtgaaaattatactcagcttgcggttgcacaacaaaaagcattggtgatcccttctttacaacaacagatagcgcatttagagcaagagttacgtgcacaacgtgaaataattacttctcaagaggccgaattaagggaagtgaccacgcgttgggaagagagccgaatatccgctgaagagaaacagcgtttactgcttaatagtgaacaacgactagccactcagtttgaaaatctggctaaccgcatttttgagcaaagtggacgtaaagcgcaagagcttaatcgtcaaggtttaacccatctcctttctccatttcgagagcaactagagagttttcgtcggcaggtacaagaaggttttggacaagaagcgcgagaaaggcatacactggtacatgaaattcgccaactgcaacaactcaatgtcaaaatggcgcaagaagccgttaatctgactaatgccttaaaaggggataataaaatccaaggcaactggggagaaacggtattagcgcggatcttagagtcatctggtttacgcgaagggcacgagtttgaaactcaagtcagtattcgccatgaaaatggcagtcgttatcaacccgatgtgattgtgcatttaccgcatcgtcgagatgtgattattgatgccaaaatgtcgctgattgcttatgaaagatactttaatagcagtgatgagaatgaacaaaaacaagcgctgcatgctcatgtgaactctatcagagcgcacattaaaggcttaagtctcaaagattatcataagctaccgggagtgacttcgttagactacgttttaatgtttataccgatagagcctgcttacctcgttgctattggtcattctccagatttattagaagaagcattgaaaaataatataatgttggttgggccatctactttacttgttgctttgcgtacaatagccgcattgtggcgttatgaataccaaagccaaaatgcgcaagaaattgctgatagagcggctaaaatgtatgacaaattaagacttttcgttgatgatatgcaagggctaggtaatagcattcaaaaagcgcaatcgggctatctattagcgatgaaaaaactctctgaaggtcgtggaaaccttatcagccaagcagaaggctttaaatccttaggggttgagataaaaaagaccattgataatgatctggttgaaaaatcagcttctgattgatttacataaataaaaatagcggtttccgggcaagaaatgtactgaatttactaaattttgattaattagcgggcaaataatatgactcaacaatctaaggaaacaacagattttggtttccaaaccgttgacaaagatgaaaaacaaaccatggtggccaaggtttttcactctgttgcatctaaatacgatttaatgaatgacttaatgtcttttggcatccatcgtgtctggaaacgctataccattgaggcaagtggtgtaagacgtaatcaacgtgtacttgacttggcaggtggaaccggcgatttaacggcaaaattctctcgtttagtaggagagaatggtgaagtggttttagctgatatcaatgactccatgttaaaaatgggacgtgagaaactgcgtgatcacggtattgttggtaatgtcagttatgtacaagcgaatgcagaagagctgccattccctgatgattactttgactgtatcactatctcgttcggtttacgtaatgtgactgataaagccaaagcgttacgttctatgttccgtgtgctaaaacccggtggacgtctattagtccttgaattctctaaacccgttcttgatccgctaagtaagatttatgatgcttactctttccatatattaccaagaattggtcaagtgattgtgaatgatgcagatagctatcgctatttaacagaatctattcgcatgcacccagaccaagaaacattaaaaggaatgatggaagaagctgggtttgatcaggtttcctataccaatatgactggaggtatagttgcattacacaaagggtttaaattctaagatggaaaaagccactttttctcatgatattgcttctcaagtgctctatccactgataactgcatcgatggaaacggcacttaatcatgttttatatcaggaaaatgtgcttaaacctgcccgcaatcgccttgcgggcaaagtcttggcgctttctattaatgagtttcctcaatctatctatttaattttcagcgaacagcaagttgatgtgttaactcaatggaatgatgagactgattgcacgataaaaactaaattattaaccttaattaaactcactgaccgacaaaagttgtctgaattaattaatcgtggtgatattaccattgaaggcgatatgcaggtggtacaaaactggtctgccttgctggatatggcaccctgggagcctgcgcaatatttagcgccttatattggtgatttggctgcagaaggattatcgcttgcagcaagtaaagggctcaaattattcactacactatttggccgacaaaaagcttatttaagagacgctttgattgaagagtggaaaaccgccccctcaacattagagactgtccatttttatgatgaaatagaacaactggcacagcaaacagccgagttagaaaaacggttaagcaccttggagaaaaaataatgctcctcagtgagttaaagcgcctttatcatattattaaagtcttcttatcttatgggcttgatgagctaattcctaaacatcgaattaccttgccagcaagattggggtgccgagcactattttggatcaaaaatcagcatgccgataaaccattaggtgagcgcttacgacttgcattacaaacattagggcctgtttggataaaactgggtcaaatgttatcgactcgacgtgatctttttcctcctcatatcgctgatcagttggcgttactgcaagataaagtagccccttttgatggtaaaaaagcgcgacaatatattgaaaaatcatttggtggccctatcgataaatggtttgatgattttgacgaaacacctcttgcttctgcgtctattgcacaagtccataccgctacattgaaagaaaatggtaaagaagtggtattaaaggtgatccgtcctgatattcagcctgttattaaagcggatattcgtttgatgtatcggttagcgaatttattgccatttttacccgatgggcgtcggttacggcctaaagaagtgatccgcgaatatgaaaaaacattacttgatgagctaaacctattacgtgaagcggcaaatgccattcaattgcgtcgtaactttgaaaatagctctatgctttatattccggaagtgtattcggattattgccatgaaaatgtaatggtgatggagcgtatttatggtattcctgtttcagatattgatgcgttaaatgcccaaaataccaatatgaagctattggcagagcgtggggttaaagtcttttttactcaagtatttagagacagttttttccatgcagatatgcatccgggtaatgtatttatcagttatgatcatccggaaaatccatactatattggtattgactgtggtattgtcggctcactgaataaagaagataaacgttatttagcggaaaacttcttagcattctttaatcgtgactatcgtcgtgtggctgagttacacgttgattctggttgggtacctgctgataccaatgtagaagattttgagtttgctattcgcacagtgtgtgagccaatctttgaaaaacccttgtcagaaatttcttttgggcatgtgctactgaatctttttaatacggctcgtcgttttaatatggaagtacaaccgcaattggttttactgcaaaaaactttgttgtatgttgaaggcttaggtcgtcagctttatccacagcttgatctttggaaaacggcaaaacctttcttagaagattggctacatagtcaaattggtattactgcgttggtaaatggtatcaaaagtaaggcgccttactggattgaaaagatgcctgaattgcctgaattggtttatgatagcctgaaacaacacaaaaatatgaagttaacgctagaaaaattgacggaacaaataagttcacagagagtcaaacaaagacagtcctattttttattgggtatgggaacaacgctatttttatgcggtagcctgttttttgtttctggttttaaaacattatttagtgtttttatcagtttaggccttctcgcatggatttggggctggtttaaatcaggtaatgcacaataaaaacacatcaaagtttgtctttgaacaatttataatatgaattcgagattcccgaaaattgaattcgatgtatataatgggcactgttgtaaagtataactcctaaaatagttgaggaacataaaatgggcggtattagcatttggcaattactcatcatcgctgtcatcgtagtcttattatttggtactaataaactgcgcactttaggctcagatttgggtgcttcagtcaaaggctttaaaaaagcgatgggtgacgaaaaccaaaaagagaccaacaacgcagaaaaaaccacgaacgacgcagattttgatactaaaaatttagcgcagaagacttcgacagaagagaagtcaaccactgagagcaaaaataaagagcaggtgtaaaccgtgtttgacattggttttagtcagctgctattggtcatggtgataggtcttgtttttctggggccagaacgattgcccgtagcagtaaaaacaattgctggctgggtaagggcattacgctctttggcggcgaatgtgcaaaatgagctaactcaagaactaaaacttcaagagcttcaagagagcctgaagaaagtggaagagaaagcgaatttgcaaacattatcccctgagctaaaagcgtcgatggatgagttaaaagaggctgcacagtctttaaaagaaacttatcaagcacctacaacgccaggatctacagagacagagcagtctgtaaaaaccgactctacggaacctacgccttctgatttagcggcactggctgaagcgaatgaagtgaatgacgatgttcaacacagttccaaaacggtaactgaaaatacagaacatgttattaagccagatgttcctgttaccaaaacagtaacagtagagaagaaaacaactgatcaggcaaatggtgagcactaaaacatggcagtaaatgatacccaaccgctgatcagccatttaatagaactgcgtaagcgtctaatgtacagcttagtttcagttctagtggtttttctggctttggtttatttttctaacgatatctatcaattaatctcggcacctttacttgataagttgccacaggggtcaaatatgagtgcgactgatgttgcctcaacttttttgacaccgattaaattgactattatggtatccgtttttgcttctgttcctgtgatcctttatcaggtatgggcttttatcgcaccagcactgtataaacatgaacgccgcttaatgttaccgttactggtttcaagtaccgtattattttatctcggtatggcgtttgcgtattttgttgtgtttccacttgcatttggtttctttgtgaatactacccctgaaggggttaactttattccagatatcagtaagtatttaagtttcgtaatgacgctgtttatggcgtttggggccgcatttgaagttcctattgcgatcatcttgctgtgttggagtggtgtcacaacacctgatgcattaaagaaaaaacgtccttatatcttagtgggtgcttttgttattggcatggtattaacgccacctgatgttttttctcaaacattattagcaataccgatgtatttattgtttgagattggtgtcttggtgtcccgtttttatgtcaataatggcagaagaaaaacaccagaagaagaagctgaagaggctgaggcgcaagcaacagaacagcagaaataattttaggaagtgagttttctaaaaacataatttattaacccagctaaggctgggttaactttttagaaaggctcttttttaaactctttattatcaacggattttttcacttcattatttaatatttttaatagcaaaatagagcgagtttcgccgtctggctcttggtatatcgctttgatcccctgaaaaacaccttccgtaattaatacataatcaccactatgcggcacattttcttcactgtagataactgaagacggtgtcggcgattgtaaggtatctataacctcttgtggcactgtgacaggatagcgtccaaagcgcacaaaggcattaacaccacgggtagaatttatcgtagtggtatgaatgacctctggatcaaattgaataaatagataattcgggaacaaaggctcggtgaccaaagttcttttatttcttattaacttttctattgtcaccatcggcgtaaagcagatcacctgctgacgttctaagtgttcgatcgcccgagcgatttgtccgcgtttacaatacagaaggtgccagtttttcataatagagacaaagggttagttgattctaattaggaggataatagcaaatttatgataaaggtaacagtcatctgtcggtaaatgtaacaagtgaaatgcaattttatactagaaaatgatcactgaaaccgtgttcagacgcattgacatcctccacgccctaaaggacgtggatccctactgcgttcagactgatgtctgaatcacctcggcgggttcctgcttcgacgggcggtctgactgccccctccctccacaggcaagcacggcatgtcctgccgctaaaatgttacgtgccccgttgatatcagcattcgctgtatatccacattcaaggcactcgaattgactttgtgactggcggttttcctttgctgtatgtccacagcaagcacacttctgactggtgtaggcagggggtattgccagtacctgaccacctcgccagagctgcttgtactcaagctgacggcgcatttcataccagccctgctccagtattgagcggtttaaaccagatttagcttttacgttccgtccatgccgttctgtcgtaccttttgccgatttagacatgttactgacctttaagtcctcaatgacaatcattgcgtggtttttgctgatttcgctggtgactttgtgaaggtagtctttcctgatattggcaatatgagaatgcagacgttgaattttgcgcttttgtttttgccagttggcactgaatttgattttacggcttaacttccgttgaagccttgccagctttcgctggttgactttaaaactgctgacgggcgggtataccgtaccgtctgaaagcgtggcaagttttgtaacgcctgcatcaagcccgactattgaggttgattcaggttgtggttctgtcgcttcatactcagtctggatgctgacgtaccatttaccgcatgactgactgaccgtgacgtttctcacttctccgacgacttcacgactgttgcggtagcgcatccatcccaactttggcaatgatatacgactattggattgatcgagcttcacgccctgcgggtagcgaaaagcgtcatttttaccgcgtttcttgaatcgaggaaaagcggtacgcttctggaaaaaattcttgtaagcccgttccaaatctttaagtgactgttgtaacggttgtgatggggcttccttcaaccattgtgtctctgtgtcagatttccactcaatgagccatgaagccatttttgtatagggaatgtatttattccctgcttcgtaattctcattctgacgtgctaatgcccgattgaaaacaaaacgacaagcccctgcaaagcgtctcatctcacgctcttgctgaccattgggtcttaactggaatttaaaggcttgtagacgtttcatattacctattatactttggtccatgaaaaatgaaactaatattcgccgtggcagacattgtgtattcctgatgcacgtccatttggtctttgtcacaaaatacaggcgaaaaatatttgatcaggatgccattgaaaaattgcgaggctactttgccagtgtttgtgctgattttgatgttgaactggttgaaatggatggggaacgggatcacgttcatttactgattaattacccgccaaaactggcgatatctaatctggttaacagccttaaaggggtatcgagtcgattacttcgacgtgatcgtcctgatattgcccaatgtgattactacaagggggttctttggtcgccgagttatttcgcggggagttgtggtggcgcaccaatatccattatccgccagtacattgagcaacaggaaacaccgagttagttaaaaaaccgcgccttatatccccgacctgaaggacggggttttacggtgctttggataaatgcagtggttttgagaagtttcaatcttatctcagatagaggtaacaagttgacaaaaaaatgatggcaaaaacaagaaaaaactcccaagataattatcttagatcctgatccataattataaagaggttttcaaatggaagtttttttattgagtaatgggaagattgccggggacccacaatggttaagttacgccaaagataatatcgacagcatgattaaaaagcgtggtattcgttctgccgtgcttattgcatatgcggttattcgttctgatcacgaccaacgtgctcgtgaattatcagaagtattaggtattgaagtgacttgtattgaacattttgattcagaagtggaagccattaacaatgctgagtgtattttagttagtggggggaatacgtggttattaaaccaaatgctgcatgagaaaggattagtggttcctatccagcgtgcagttcgtgaacgtaatatcccttatatcggttggagtgcgggttgtaatgttgccactccgactatccgtactacaaatgatatgcctgtgcgctgttctgttgttatgccttcactgggattattccctgtacaaattaacccgcactatattgatgccaccattagtggacatatgggcgaaactcgagatgagcgtattgcggagttttgtgcgatgaacccagacgagatagtggttgccattcgtgaaggtagttacttatatattcagggtgaagagttacgttattacagcgctaaaaatgaaggctttaaaattttccaacatggaaaaacttttccagaacaatttgatacaaaaatgttggcaaaatgggttccatttcgctgtttataataataatttgcaatctcatataaaaggcattgctttttagtgagttatgcgtttagcttatagtgtttcaaagagggctttgccctcttttctctcactcactggctcgtaagattatgatgaaataccgcgatttaagagatttcctttcattactcgaagaaaaaggtgaattaaaacgcatcacctttgaaatagatccctaccttgaaatgaccgaaatagcggacagaacattacgtgctggtgggcctgcactgttatttgaaaatcctaaagggtttgatatgccagtgctatgtaatttatttggtacacctgagcgtgttgctatggggatggggcaagatgatgttaaagccttacatgaagtgggtaagctattagcatttttaaaagagcctgatcctccgaaaggatttcgtgatctttttgataagttacctaaatttaagcaagttttaaatatgccaactaagcgcctgagcaaagccccttgtcaggaggttgtgttaactggcgatgatgttgatttaactaagatccccgtgatgcattgttggcctgaagatgcagcacctttgattacatggggacttacagtaacgcgagggccatttaaagagcgccagaatttaggtatttatcgccaacaagtgcttggcaaaaataaagtgattatgcgttggttatctcatcgcggtggcgcgttagatttccaagaatggtgtcaaaaacacccaggagaacgttttcccgtttctgttgcattaggagctgatcctgcgacaattttaggtgccgtaacgccagtaccagatacattatctgaatatgcctttgctggattattgcgaggtaataaaacagaagtcgttaaatgcctttccaatgacttggaagtcccggcaagtgctgaaattattctcgaagggtatattgaacccggtgagcttgcaccagaagggccatatggtgatcatactggttattataatgagattgactcttttccagtatttaccataacacatctaacacgtcgtaaagatgctatctatcactctacttatacagggcgtccaccggatgagccggcagtattaggcgttgcgcttaatgaagtattagtaccgatattacaaaaacaatttcctgagattgtcgatttttatttacctcctgaaggttgctcttatcgtttagcggttgtgaccatgaaaaagcagtatgcaggtcacgctaaacgcgtaatgatgggagtttggtcttatttgcgacaatttatgtatactaaatttgtgattgtttgcgatgatgatgtgaatgcaagagattggaaagatgtgatttgggctatcacaactagaatggatcccgcaagagataccattatgatggaaaatacgccaattgattatcttgattttgcttcacctgtttcaggtttaggctccaaaatggggttagatgcgaccaataaatggcccggtgaaacagagagagagtgggggcgacctatcgtaatgacggatgaaataaaacagcgggtcgatactatttgggaacagctcgatattgttaaataataatagaggaacaacatggcgatactgaactgtaaagtctcactcgttgagccgataacagatacggtgtatcgggtaagattattacctgatggcccatttgattttcaggctggacaataccttttagcggttatggatgagcgagataagcgcccattctctattgcctctattcccgaaaataaagactttattgagcttcatattggcgcgtcagatctgaatctttacgcaatggctgtgctcgatcttattttagaaactcaacaattaaagattgatattccccatggtaatgcgtggtttagacaacagagccaacgtcctttgttgcttatcgcaggaggaacaggattttcttatactcactctatcttgctagcggcattacaagaaaatcctcaacgtgcgataacgctttattggggaggacgagagcaggtacatctttatgatcttaatgagttgcaagatttaacggaaaagtatccctcattatcagtcgtacctgttgttgaacaacctgatgacgcttggcgtggtagaaaagggactgtattaacggcaattagtgaagattttggcgatttatcatcctatgatatttatatcgcaggacgttttgaaatggctaaaatagcgcgagatcgtttttgtaatgagcgtaatgctgatagagaacgcttatttagtgatgcttttgagtttatttaataagcaataacgataaaaaaaccataaaaaaaccataaaaaaaccataaaaaaaccataaaaaaacccgcccctgacggcgggaaaatggttaaaaaaccaagcaatcaaacatgtcaaccaagtgatattactcaaaatgaaaaatcatcttgattaaactcgctcaataatggttgctatcccttggcctaatccaatacacattgtcgctaatcctaattgtgcatctttacgctccataatatttaatagcgtggtggttattctggcaccagaacaacctaatggatgcccaagtgcaatagcaccaccattaagattgattttgtcatcaatgctatcgagtaagttcatttttttcatgcaagctaaggattgcgctgcaaaggcttcgttaagttcaaagatatcaatatcactgagggttaaccctgctttctttagcgctatttcagtggcaggaacgggaccatatcccatgattgccggatcacaacctgttaccgccatcgaacgaataattgcacggggttttaaatgatgttgcttagcataactttcgctcgtgataaacatcgcggatgccccatcagagacggccgatgaattccccgcagtgacggagcccgtggcgggatcaaacacgggtctaagttgtgctaattcatcaaggcttgggttataacggataacttcatccgtgctgacgcgtataaaatctcctgctgtatcatgaccattaatggcaacaagttcgttgtcaaaatagcctttttgggtcgcgagggcggctaaatggtgtgagcgataggcgaatttgtcttgttcttcacgagatatttgaaatgattttgctaacatttctgcagttaaccccattgagaatgaagcctttgccacagaaagatttaatgctgggttaaagtcagcattataggtcatcggtacatgacccatatgttcaacgccaccaattaaagcaacttggctctctcctaacataatttggcgagcaccgtcatgcaaggcttgcatcgaagagccacataaacgattgacggttactgccggaactttatgtggtaattctgctaatagtgcggcattacgtgcaatattaaagccttgctctaaagtttgttgcacacagccccaaatcacatcgccaatatcattgggatcaatatcagggttacgcttaagcaaagcttgcattaattgcgcagagagattttcagctcttacatggcgaaatgctccaccttttgaacgtcccattggggtgcgaacaccatcaattatgacaaccttttccatttcttctctccttaagcgagttctctgatgttaacatctacttttgcaggctttggatagtaggtttcgttacgtaatgctttttgttttaagctctcaggaatttggtaaagtggccctaactctgagtattgctctgcatttgcaacaaattgtgctaatccaatggtatcgaggtaacggaagacaccaccacggaaaggagggaagcctaaaccatacactaatgcaatatcggcttctgcaggtgaggcgataatgccttcatctaagcagcgaataacttcattgatcattgggatcatcatacgagcaataatagtgtcttggttaaattcctgttttttgccgacatgatgttcaataaggctgtgaatatcgttatctacctgcttttgttttttaccacgcttatcaatagtgtagtcatagaacccatgattatttttctgaccatagcgttgttgttgatataaaagcgcaataacgtctttatcaatactgcccattctgtctgggaaaccttgagccatcactgcttgagcatgattcgctgtatcgataccgacaacatccagtaaataagccggacccattggccagccaaaggctttttccatcactttatctacagcaataaaatcagcaccatctcttaataaaagagaaaatccggcgaaataagggaagagcacgcgattgacaaagaaccccgggcagtcattaacaatgattggcgttttacccattttgctagcataactgacaatgcgattaatcgtctcttcgctggttttttcacctttaatgatctcaactaaaggcatgcggtgaacgggattaaagaagtgcattccacagaaattttcagggcgtgttagtgatttggcaagtagcgaaatggggattgttgaggtattcgaagcaagtacagcatgatcagcaaggagcgcttcggtttcagcaagtacagaggcttttactttagggttttcaaccaccgcttcgaccacaatttgtgcatcagctacactggcatagtttagggtaggatgaatagaggcgagggtttttgccatatcaacggcactcatacgtcctttttcttgacgtttttgtaacaggctgagtgcttctgtcatacccaattcaagggagttggcattaatatctttcatggtaacaggaatgccttttagtgcagattgataggcaattccgccacccatgatccccgcgcctaatactgccgcttgttttggtaagctagcatgacgttttttagtaatgcctttcacatattgatcattaaggaaaatacccactaatgctttggcaacatcggtgcgggtcagtttgacaaagttttctgtttccaattcaagtgccgcttttctatctagaaatgcggctttttctatcgtattaacggcggtcattggggctggataatgagggcctgcgactttcatcaccatgccttttgccacagcaaatgacattttatgttcaagttccgttaatcttaatgccacagttttaggttgacgagcagcttgccagtcaaatttgccatcaatggcttgctctatcagtgaaatggcacttttttttagcttatcaacagggacaatagcttgaattaagccattcttaagtgctgtttcggcattaatatctttacctgcggtaataatttctaaggcattatcaacgccaataaggcgaggtagccgaacagagccaccaaaacccggcataataccaagttttgtttcgggtaaaccaatgcgtaaatccggtgatgcaatacgaaaatccgttgctaatacacattcacagccaccgcctagggcgtagccattaatggcagaaactgtaggaacggggagatcttctaatcgattgaaaatatgattagcaaaatgtagccattgtgtcagttcttcaacgggtgcatcaaaaagtgataaaaattcggtaatatcggcaccaacaataaaggcgggtttttctgaacgtaaaataaccccttttagatcagatgtattttctaatactgttaacgcttcgcttaacattgccaccgtttttgtatctaatttattaatagaaccgctagcattgaaaacgagctcaacaataccttgcttcacccaatcggcttgaatattttcgctttgatagagcatttgtattctccctaaagtataaactggtatgaccagataattagagtgtgaatacaatgttaattaattgcaaatatttgattaaggaaatgtagggctgatcacaatgaaattatctaatatattgatttttatatgattggtttaaatgaataaatcagcataattaaggatcgtaaaaacatagtaataagtcatggtaagctatttttgctatggtgttaccctgtaaaagagttggcgtgttaagctgaataattaacaataaataaagataggtgattagtaatggaaaaattgctttctctgtatcaagaacatatcaaaacactacaaaatcgtactcgtgatgctttatctagacaccaccttgataatgtcttgattcactctggtgaacctattggtgttttccttgatgatagtgattacccttttaaagtgaatgcacactttaaagcgtgggtgccagtaactgatgtgccacattgttggttattggttgatggtgtcaataaaccaaaattctggttctattcacctgttgattattggcatagtgttgaagctttaccaagtagctattggacccatgaaattgagctgatccatttaaaaaatgtcgatgatattcaaaaagagctagcaccttttattaataaaaatactgcttatattgggccaaatacacaacgggctgattcattaggtgtcagtcttgataatgttaataaccaatctcttcttaactattatcattattatcgtgcttataaaacgggttatgaactagcatgtatgcgcgaagcgcagaaaatggcagtcaatggacatatcgccgctcgtgaggcattccaagctgagttaagtgaatttgatattaatatggcttatttaatggcaacaggacatcgggacacagatgtaccttatggcaatattgttgcattaaatgaacatgctgctgttttgcattacaccaaattagatcatcaatcgccagatgaatatcgtagtttccttattgatgcgggagcagagtataatgggtatgctgcggatattacgcgtacttattcagcgaaagaaaatcatgaatttactgctttagtcaaagatatgaatgatgcgcaacaggcattgatagcgacaatgaaagcgggagtacgctacagcgaatatcatattcaaatgcatcaacgtattgccggattattacataaatacggtattgttaagggaattagcgaagaagagatggtgagtgaaggattaacaactcccttcttaccacatggattaggccatgcgctaggtttacaagttcatgatgcgggtggatttatgcaggatgataaagggactcatttagctgcgccagccatgtatcctttcttacgttgtacacgtattgtagagccgggaatggtacttaccattgagccaggattctattttattgattcgttattagcaccttggcgtgaagggaaatatcgtagtcattttgattggcatttgattgaacacttcaagccttttggtggcattcgtattgaagataatattattatccacgataacaaaattgaaaatatgacaagagacttacatttagcctgatgaaagcttatttgatccccgctgaaacggtagaattcagtgaagaaataaagaagagccgttttattacatttattgctcatactgaagggattgaggctgccaaagcgtatatccaatcaattaaagcgcagtttcccgatgctcggcatcattgttgggcatttgttgccggaagacctgatgattcacaacagttaggtttttctgatgatggtgaaccaacaggcacggcgggaaaacctattctagcacccctgttagggagtggtatgggagaggtgactgcagttgtggtacgttatttcggcgggatcaaattaggcactggtggattagtacgtgcttatggcagtggggtacagcaggcattaaaacttttgccaacgaaaaccaaagtacctcagcgccgatttcttgtggagtgtgaatattccttagtgtcattacttgagcaagttattgcagaatatcaagggaagatcctctctagtgaatatactgataaagtcacttttgaactatcattgccagcagtagagagtgaaaaagttgaaagtaaactacgcgatatcagtcgtggcagtatgcaattaatatgtttagaaccgaatgaataatcgttgctaccaaggaaatcgctaaatgcattttcgttcaataacccgaattgttgggctacttgttattttattctctgtcacgatgatcatccccggtatcgttgcgttgatctatcgggatggtgcaggacgagcatttagtcagacatttattgtcgctcttattattgggctaatgttgtggatccccaatcgaaacaataaaagtgatctaaaacccaaagaaggttttcttattgtggttttattttggactgtgttaggcagcgtaggggcattgccttttattttttcggaacaacctcatctatcgattaccgatgccttttttgaatctttttccggattaacaaccacaggggctacgacacttgttgggttggatagcttacctaaagcgattttattttatcgccaaatgctgcaatggttagggggaatggggatcatcgtattagcggtggccattcttccactgttaggcgttgggggaatgcagctttatcgggcagaaatgccggggcctttgaaagacaataaaatgcgcccaaggatcgcagaaactgcgaaagcattgtggctgatttatgtcttactcactattatttgtgcccttgcgttgtggattgcgggtatggacgtgtttgatgctatctcgcatagtttttctactattgcaatcggtggattttctacccatgatgcaagcattggctattttaatagtccaacaattaacgtcattattggtgtttttctattaatttcagggtgtaactttgctttacacttttcggttttaacagggcgaagcctcaatatttattggcgagatcctgaatttcgcatgtttatctttatacagctcggattagtgattatttgtagccttattctatggctctattcggtatatgactctggatggacaacaattaatcaagcttttttccaagttgtttcaatggcaacaaccgcagggtttgcaacagatagttttgcccagtggccaacttttttacctctgttactgttgtgctctgcctttatcgggggctgtgctggttcaacaggggggggattaaaagtaatccgtatcttactgctatttttacaaggctctcgtgaattaaaacgtcttgtacaccctaatgcggtttatacgattaaactaggacatcgagcattaccagagcgtattatagaagcggtttggggctttttctcagcatatgctttagtgtttattattagcttaatgctgttaatagcgacaggtgttgatgagttttctgctttttctgctattgctacaacacttaataatttgggtccaggattaggtattgttgctgataactttacaacaatgaatccagccgctaagtggatacttgttgtcaccatgttatttggccgattagaagttttcacattattggttttatttacaccaacattttggcgtgattaaccaaaaacaaggagtgatgtatgagcgcgctgttgctgtactgcagtacagatggtcaaactaaaaaaataatgacgcacatagctaataaactaagacaacagggctatgaatgtgatgtaagagatttaactgctgttcaccatagccttaatttatctgcttataataaagtgttagttggggcatcaattagatatggctattttaataaagtactggataaatttattacccaacacctttctcaattaaatagtatgccatccgccttctttggggtgaatcttacggcaagaaaagctgaaaagagtacgcccgaaaccaatgcttatatgcgtaagtttttagataagactccatggaaacctagattaacaggtgtttttgcaggcgcgcttctttacccacgttataaatggattgatagagtgatgatccagcttattatgaagatgactaagggtgaaaccgatccaacaaaagaaatcgaatatactgattggaataaagttagcgaatttgcgacaaaattttccaaaattgagtgatatttgttcgttgtgacctgttttttgtacgcattgttggggttttaatcgaacggtaaatttttttcaaaaaacacttgcgctaatctgagaagcccctataatgcgcacccactgaccgacgatgagctgacaacagcaacgacggaaagggaagagaaaagaaaaaagtttgaaaaaactcttgactcttcagaggaatagcgtagtatacgcctcctcgcaacaacgcagaagaccggaaacggcagcgacagttgcactgctctttaacaaattatcagacaatctgtgtgggcactcgcagagacgatatcttctaaaaaaattagatgtatcaagtcttgaagagtgactaacaagttaattcatataatgaataagctaagttttcgatttctttgagcatcaaacacttttaattgaagagtttgatcatggctcagattgaacgctggcggcaggcctaacacatgcaagtcgagcggtaacaggagaaagcttgctttcttgctgacgagcggcggacgggtgagtaatgtatggggatctgcccgatagagggggataactactggaaacggtggctaataccgcataatgtctacggaccaaagcaggggctcttcggaccttgcactatcggatgaacccatatgggattagctagtaggtggggtaaaggctcacctaggcgacgatctctagctggtctgagaggatgatcagccacactgggactgagacacggcccagactcctacgggaggcagcagtggggaatattgcacaatgggcgcaagcctgatgcagccatgccgcgtgtatgaagaaggccttagggttgtaaagtactttcagcggggaggaaggtgataaggttaatacccttatcaattgacgttacccgcagaagaagcaccggctaactccgtgccagcagccgcggtaatacggagggtgcaagcgttaatcggaattactgggcgtaaagcgcacgcaggcggtcaattaagtcagatgtgaaagccccgagcttaacttgggaattgcatctgaaactggttggctagagtcttgtagaggggggtagaattccatgtgtagcggtgaaatgcgtagagatgtggaggaataccggtggcgaaggcggccccctggacaaagactgacgctcaggtgcgaaagcgtggggagcaaacaggattagataccctggtagtccacgctgtaaacgatgtcgatttagaggttgtggtcttgaaccgtggcttctggagctaacgcgttaaatcgaccgcctggggagtacggccgcaaggttaaaactcaaatgaattgacgggggcccgcacaagcggtggagcatgtggtttaattcgatgcaacgcgaagaaccttacctactcttgacatccagcgaatcctttagagatagaggagtgccttctggaacgctgagacaggtgctgcatggctgtcgtcagctcgtgttgtgaaatgttgggttaagtcccgcaacgagcgcaacccttatcctttgttgccagcacgtaatggtgggaactcaaaggagactgccggtgataaaccggaggaaggtggggatgacgtcaagtcatcatggcccttacgagtagggctacacacgtgctacaatggcagatacaaagagaagcgacctcgcgagagcaagcggaactcataaagtctgtcgtagtccggattggagtctgcaactcgactccatgaagtcggaatcgctagtaatcgtagatcagaatgctacggtgaatacgttcccgggccttgtacacaccgcccgtcacaccatgggagtgggttgcaaaagaagtaggtagcttaaccttcgggagggcgcttaccactttgtgattcatgactggggtgaagtcgtaacaaggtaaccgtaggggaacctgcggttggatcacctccttacctaagagatacgtgttatgtgcagtgctcacacagattgtctgatgaagaacgagcaaaagcgcgtctgcgaagctgacagaagtccccttcgtctagaggcctaggacaccgccctttcacggcggtaacaggggttcgaatcccctaggggacgccaatgcgcggtatgagtgaaaggcgtaccacttatctgacgagagtcagagaataactaagctaattcaaacgagttatcttacttattatgctctttaacaatctggaacaagctgaaaaattgaaaacaaatcaatatatcaacgaggtatattggtgagtctctcaaaatctcaaactttgaatgtgttttgacatcaaagtgggatgagcgagcaatttacagttcgaggcggacagcgcacagcaagcgcagcatacttaagtatgtgagcattgcgagcactgcccaacgaagaaatgtaatctgcgcagccatcaccacccagatagtctttgaaagagacactttcgggttgtgaggttaagcgaataagcgtacacggtggatgcctaggcaatcagaggcgatgaaggacgtgctaatctgcgaaaagcgtcggtaaggtgatatgaaccgttatacccgacgatatccgaatggggaaacccagtatccaatggatactatcattaactgaatccataggttaatgaggcgaaccgggagaactgaaacatctcagtaccccgaggaaaagaaatcaaccgagattcccctagtagcggcgagcgaacggggagcagcccagagtcttaatcaatagcagtgtcaggagaacggtctggaaagtccggcagtaaagggtgatagccccgtatctgaagatgctgttattgtgaactcgacgagtagggcgggacacgtgttatcctgtctgaatatggggggaccatcctccaaggctaaatactcctgattgaccgatagtgaaccagtaccgtgagggaaaggcgaaaagaaccccggcgaggggagtgaaaaagaacctgaaaccgtgtacgtacaagcagtaggagccccatcactcaagtgcctcgcactgagtgatgcaagaacatcaccgaaaatagcgccgaatttgctaacaaggttggtcgattttttcaagccgtcgcgcagtgtacctagaagtacacgagcaacggaagttaaaaaatcgggcaagattgaacgcaaaggcaagcgggacatttgaggatggggtgactgcgtaccttttgtataatgggtcagcgacttatattctgtagcaaggttaaccgtataggggagccgtagggaaaccgagtcttaactgggcgaatgagttgcagggtatagacccgaaacccggtgatctatccatgggcaggttgaaggttgggtaacactaactggaggaccgaaccgactaatgttgaaaaattagcggatgacttgtggatgggggtgaaaggccaatcaaaccgggagatagctggttctccccgaaagctatttaggtagcgcctcgtgaactcatcttcgggggtagagcactgtttcgactagggggtcatcccgacttaccaactcgatgcaaactgcgaataccgaagaatgttatcacgggagacacacggcgggtgctaacgtccgtcgtgaagagggaaacaacccagaccgccagctaaggtcccaaagtcatggttaagtgggaaacgaagtgggaaggctcagacagccaggatgttggcttagaagcagccatcatttaaagaaagcgtaatagctcactggtcgagtcggcccgcgcggaagatgtaacggggctaaaccatgcaccgaagctgcggcagcgacacaaagtgttgttgggtaggggagcgttctgtaagcctgcgaaggtatactgtgaggtatgctggaggtatcagaagtgcgaatgctgacataagtaacgataatgcgggtgaaaaacccgcacgccggaagaccaagggttcctgtccaacgttaatcggggcagggtgagtcgacccctaaggcgaggctgaaaagcgtagtcgatgggaaacgggttaatattcccgtactggtggtaactgcgatgggggaacggagaaggctaggttgtccgggcgacggtcgtcccggttcaagcaggtaggcagagtgattaggcaaatccggtcacttaatgctgagatgtgatgacgaaccaccaaggtggtgaagcaattgatgccccgcttccaggaaaagcctctaagcttcaggttaccaacaatcgtaccccaaaccgacacaggtggtcaggtagagaatactcaggcgcttgagagaactcgggtgaaggaactaggcaaaatggtgccgtaacttcgggagaaggcacgctggcggtaggtaaagtcccttgcggacggcgctgaagccagtcgaagataccagctggctgcaactgtttattaaaaacacagcactgtgcaaacacgaaagtggacgtatacggtgtgacgcctgcccggtgctggaaggttaattgatggggtcagccgtaaggcgaagctcctgatcgaagccccagtaaacggcggccgtaactataacggtcctaaggtagcgaaattccttgtcgggtaagttccgacctgcacgaatggcgtaatgatggccaggctgtctccacccgagactcagtgaaattgaactcgctgtgaagatgcagtgtacccgcggcaagacggaaagaccccgtgaacctttactatagcttgacactgaacattgagccttgatgtgtaggataggtgggaggctttgaagtgtggacgccagtctgcatggagccaaccttgaaataccaccctttaacgtttgatgttctaacctaggcccataaactgggtcggggaccgtgtctggtgggtagtttgactggggcggtctcctcctaaagagtaacggaggagcacgaaggttggctaagcatggtcggacatcatgcggttagtgcaaaggcataagccagcttgactgcgagagtgacggctcgagcaggtacgaaagtaggtcttagtgatccggtggttctgaatggaagggccatcgctcaacggataaaaggtactccggggataacaggctgataccgcccaagagttcatatcgacggcggtgtttggcacctcgatgtcggctcatcacatcctggggctgaagtaggtcccaagggtatggctgttcgccatttaaagtggtacgcgagctgggtttagaacgtcgtgagacagttcggtccctatctgccgtgggcgttggaagattgagaggggttgctcctagtacgagaggaccggagtgaacgcaccactggtgttcgggttgtcatgccaatggcattgcccggtagctaagtgcggaagagataaccgctgaaagcatctaagcgggaaacttgcctcgagatgagtcttccctgtcactttaagtgacctaaaggaacatttaagactaagacgttgataggctgggtgtgtaagcgtagcgatacgttgagctaaccagtactaatgaaccgtgaggcttaacctgacaacaccgaaagtgttttgtcagagagacgaaacgatgaagtcagcttgtttaagattgaattactggcgacttaccgaaaggaaagaagcgagtgattaaaaccgaatttgcttggcggccatagcgcggtggtcccacctgatcccatgccgaactcagaagtgaaacgccgtagcgccgatggtagtgtggggtctccccatgtgagagtagggaactgccaagcattaaataagacgagaaagccaacccaatgggttggcttttttgcgtttgaaaactaatcctgtgaatttaagcatgctctagatgagggcaattttactatctatttttcgttgatattaacagatgttgtggcgagaaaaagcggctaatacggttcgctcggatatttctaaataactttccatttcgattgccgcttcttgcgctttcccattcatcaatagcgttaaaatatgctcattcttctcaatataaggagcatgtaataattgaggatcattgagtaaaccaaaggctaatcgtaattctgctaaaataagttgatattgtttaaataacctagggctatcagaaagctcgacgatagcggtatgaaaatgcatattacaggttccaacgctattccaatctttttgttgttgaaacatttttgcttgattaacgttatcttgcatgcgggaaatggctgggtgcattggataggcatgtcgtaaagcatcacattcaatcagccttcttacgcgataaatatccataattgatgccatatctggtacagaaacaaacacaccacgattaggtttataggttaataggccttcttgggttaatatacgaaatacttctcttaatgtattacgagatatttcaagctgctcgcttaaagtagcttctgaaagcctctctcctggaggtaattcgccgatagtaattttttggcgaataatatcagcgattttttggcaaaggatctgtggtgatgtttttttctgcattatcttctgctataaacgtaatagaagcctctattctaacagtcagctatataatatataacctctaatatacaactgtgctagtttcctcactctctttatccttgtttttattaaaaatagttaacaaaattattaataaatttttatattatcaactgtatttgatgccaaaatgtatgcaccaattttgcgcataactcttttttatgcgctattttggggcatatctattttttactctcccactcaaatgtcaataaaatgttaaaaatgagatcttgttggcacttttatcatcgtatatttaaatctatttgcttatttattcatctattattattaattgttcaacaatctaatatctattgattaacaattattactccgtgctcaacaatggcatgctaattgccttactacttacctaagcaataataattaaaataattatgataaaagggggcctgttatggctacacaagatcctgtgaatacaacatcaccatcatttataaaaaataggcgttcatcattaattgcagcgatttttttaatggctacatctgcaattggtccaggttttattacgcaaacagctacctttacagcgacgatgggagcagcctttgcatttgggatattagcttctatcgtcattgactttgttgtgcaacaaagtatttggcgagtcattaccgtgactaacatgcgcgcttctgatattgcgaataaggcaattcccggtagtggatacttattagctgtattggttatttttggtggtttggtattcaatgtcggtaatattgctggggctggtttagggcttaatgccatggtaggactggatcctaaatggggtggggttttaagtgctttactggcgatttatatcttctcttcacgcaaagcaagtcattttattgatcgtatgatcattgttcttggcatcgtgatgattttattaacactttttgtaatgtttgcgtccaatcctcctataggtgaagcattaaaacaaacagtactgcctaatacgattaattttgccactataacaaccatcgtcggaggtacggttggtggttatatttgttatgcaggagcacatcgtctgctcgataaaggtacaacaggtattgaaaatatcgatgcggtatctagcgcggcaactaaagggatattagtggttggattaatgcgttatatcctatttttagcaattttaggtgttgtcgcaagtggagtgacactagatatttccagccatgcggctaatcctgcttctcaagcattccaacatgcagcgggcttaactggactacgaatttttggtcttattttatgggcagccgcactgactagtgtgattggtgctgcttatacgtctatgtcgtttataaccgtgtttaaaaagggtattacagagcgtcaacgcaatattgctactattatttttatcgctatttcattggcaatttatatggttatgggaacagctcctgctgccttattagtctttgctggtggcttcaacggattgattttacctattggtatgacgttatttatttttgttgcatggcgtcgtcaagatcttatgaatggctataaatatccaatgtggttgcaatggtcggcaattttagtctgcgctttgacttggtatatggggatcatgtctgttggcgctattttcaattacctcaatattgcttaagagaataataacgatgataaaagcggtagatttaaatagtgatttaggtgaaagctttggtcaatggcgtatgggcaatgatgctgcagtgcttgaaattgtcagcagtgccaatattgcttgtggttttcatgctggttcaccagaaggcattttaaaaacattaaaagcagcgaaacagcatcaagtcgcgataggtgctcatgttgcttatcctgacttagtgggttttgggcgacgcaatatggatattgccagtgatgaattaaccgctgatgtcatttatcaaattggcgctttgcaaggtttagcgaaagccgtcggtatgaaggtaacttatgttaaacctcatggtgcgctttataacaccattgctcatgataaacgccaagcattagcagttattgaagctattttagctattgatccacaacttattttagtggctttagcgggatcaccgttgatcacacttgcgaaagagaaagggttacgtgttgttgccgaagcttttgctgatagagcttatcatgctgatggcacacttgtttcgcgcaaacaagagggggctgtattacacgatcctcaattggtggctcagcgtatgttaaagctagtacaaaaagggggcgttgaatcgatagagggtacttttactgctatacaggcggattctatttgtgttcatggtgatagtcctgatgcggttaatctcgcaaaaagtgtcaaagagatcttaataacacacggtattgcgataaaacctttcacatctgcaataggaataaaggaggcgtaatgacttattttatgcaagcaacgcctgatgctattacagcagccgctcgatccgttattggcaataaaagggaggcgtattttgcgctttttacctgttaatttatctcacatattagttgagttgacttcattaaaagagacattggcgttttatgaagcaattaagcaagccaatattgctgagatagaagatattgttcctgcggcaaaaacactattgatccaatatgtaccttggttaattacggcgaaagagttagtggcaatattgcgcaatatcgagataaaagcgatcgcgatgcgtcaaagtcacttattaacaatccccgttcattatcaaggagaagatctgcatgaggtggctgaattattggggatcactgcgacagaggtgatccgcagacacacagaacaaacttatcaagttgcttttacggggtttgcaccgggatttgcttatttaattgctgataaaactgagctttatgttcctcgacgtaaaacaccacgtacacgtatccccgcaggctctgtaggattagcgggagaatttagcggtgtttacccacagcaaagccctggtggctggcaattaattggtactacagagataaaaatgtgggatctctcacgtgaacagccggcatttttattacctggtgatactgtacagtttgttgatgtacaaaaagcgccagtgacggtttcattacctgagaaaaaacaatctattaatgctttatcctttaacaaggataaagggctatatgttatttccgcaggtctacaaaccttatttcaagatgaagggcgtttaggtgctgcatcaatgggggttagtgcatcaggagcacttgataaatgtgcgttacatgcagcgaatcgcttagtgggaaacccgccttcattagcagcattagaaataacacaaggtggattaatactaaaagcgcaacaagactgtgtcatagcgctgtcaggtgcagattgtacgatcagcttaaaacaaacgaccggagatatagcctttttctctacttatcaaactattgatgtacgtagtggagatgaaatcactgtagggatacctacagcggggattcgtagttatctggcagtgagagggggttttgaattaagcccagtgttaggtagttatgcgtttgatactttagctcagattggccctcgagccttacaaaatggcgatgttcttcatctaaacgatgataacgcatcaacgggcattattagccaagagcaaccgagtttcagtttaccaaagcaagaggatatcgttacccttgatattgtgttaggacctcgtacggattggtttacagaagatgcgataaaaacattaacctcacaattatggcaagtgacaccacaatctaaccgtatcggattacgtttattgggggataaatcgcttgaacgtcagcaacaacaagagttatcgagtgaaggaacttgcattggtgccatacaagtaccgattaatggtcaaccggtattatttcttcatgatcaccctctcactggaggataccccgtaattggggctgttgccgaataccatctgtcattggcggggcaaatccctattaacgctaaaattcgttttaacccaattactttatttcaagaatattgataggagtatgccactcatgataacaactaaccaaaagcaacgagtgaagcatcgagtgttgattgctaacagaggtgaaatcgcagttcgtattattcgtgcttgtcaggattatggtgcaacgtccattgctatttatgcagatgatgatatagatgcattacatgtgcgtcttgcagatgaagcctatggtttaaagggtaactcaccgaaagaaagttatttagcgatagataaaatcattgaaattgcccataaaagcaaagccaccatgatccaccctggttatggcttcctttctgagcgagctgatttcgctaaagcggtacagcaagcgggactcctttggattggcccagatccacagactatcgaagtattaggggataaagttcaagcgcgtaaaattgcacaatccgtaggtgcaccattggtgaatggtactgctgatccggttagtgatgctaaagaggttctggattttgcgaaacagtatggcttgcctatcgccattaaagcggcatttggtggtggtggacgaggcctaaaaattgcccatcatatggcagaaattgaagagctttaccattcagcggtaagagaagcagtaaccgcatttggtcgtggtgaatgctatgttgagcaatttcttgataagcctcgccatattgaggcacaaattattgctgataaattaggccatgtcgtggtagttggtacacgagattgttcattacagcgccgtaatcaaaaacttattgaagaggcccctgccccttatttaactgatgaacaacggcaacgtattcatcaatcagcaaaagacatttgtgctaaagcaggttatatcggtgcggggacggtagaatttttattgagtgcgaacgggacaatctctttccttgaagtgaatacacgtctacaagtagagcatccggtgactgaagaaacagccggtattgatttagtgattgaacaattgcgtattgctgagggattaccgttaagtattaatgaaacccctgagcctcgtggccatagttttgagtttaggatcaatgcagaagatccggcaaaaggttttttacccacccccggtttaattagccaatttagtcaaccggctgggccgggcgttcgtgttgatagtggtgtggcggaaaatgaccaagtatcacgtcaatttgattcaatgatggcaaaacttattgtaacaggggcaagtcgtgaacaagccattgcgagagcgcgacgagctttagctgaatttaacatcgcaggcgtagccagtgtattaccttttcatcgcaaaatgatggaacatcctgattttattgataacttcagtgttcacactcgttggattgaaagcgattttcaagcacaaaaaagtcattttcctcgtagtataccagcagaaaatgaaccactagtgcgtacctttattgaaatagatggtcgtcgtcatcaattagcgctacccgcacaattactttctctctcggccgttatacccacggctattagcgagcacaaagagtgtcaggtgcgggaaaatgcggtcactgcaccgatttcagggatattacatagttggttattatccgatggtgataaagtcaatcaaggggatgttattgccattatggaggcgatgaaaatggaagtacaggtagttgctacctgtcatggtgtattgcagcaaaaggcgaaatccggtgactatttttcagcagacagtctattagctgagattaactagctgagttatcaaactattatcgagtaagcctcttagcaataagaggcttttttataataaccgtctttatattcttatttgttatatctaattccttttggttataagttattttgcttataatcgaaactgaatatgttttctacaaaaggaaattagatgctgctggtcactcaactccttattggttctgcgataggtttagttatcaccacaacgggagttgggggtggtgttatcttattacctgtgcttatctatttatttggaatgaatgcattagcagcagtggcgaccgctaatttattatcgatgttaatgaaaatttcctcttcttatattcattttcgtttaggaaatattccattaaaaccagcattattgattttagggatcatgtttccggccacatttttagccagctatggggtaacctggttgggatcacaacctcaatattatgagcaggttgaattaggcattaatatcctgatgattgtggcgattatcttttcaatgttcctttttttacaacgaatattcaaaaaatccacatcatcacatccgttatcatcattggcacctagctcatcaattcctctgaattctctttttgttcccggtatgagtgccggatttgtcttaggggcaacgggggttggtggaggattggttgtcttacccgtgcttatgcgttttgcacaaatgaatattaaggaagcgatcggtagttctatatttattactacaattttgtcaggtggctctgctattgcttatagtgctggtggctataccgatgtgcatacggccatcattctttgtttaggatcacttatttcgattcctttagcgcgctatttactggtgtatttatctgagcgcttttttcaatatttaactctgttatttattctgatcagcatcattatgatgagttggaaactaatatattgaataaaataagaaaaaattttttctcatttattaatgacattaataggacaaaaatataaaatattcttatgaatttcgatgggaagataagaatgagagatattatattagataaagccatttattctcagtgggttataagaaattctttatattggatgtctatttatagtaactggcttctagaagaaactgatgaacaatggaaaataacatttaaaaataatgatgaatcagtattgtttgaatttaataaattgctgaatgattatattttaagagaaataatagaattaaagacaggaaaatttagagaatctgttattaataaagtacttgcaagtatgaatgaaaggttaattacatgaaactattgccatttaattttgaattaattgatgaaaataagtattttatcagtaatttggcagggtttagccatgtcttaaatcagatggatttatctaatattatagattttggtaaaagtaataatgataacttaaataatatacttaggaataagttatttattactaatgatgatattcaactttctgaaatgatgatagcatcgggtttgggaaaaaaattaatgtcagagatgacattttctccgatatttatgattgttccaacattacgctgtgatcatacttgcaagtattgtcaagttagtagagcctctataagtgcacaacattatgatttagatgagaagaatatccctaaaataatttcattaataaaaagaatatcaaaaaaaaactataaactagagattcaaggtggtgagcctttaataagatttgatttaatcaaaaaaatatataatgaggcagtattccaacttggtcaagagaatattgagtttgtaattacttcaagcctttcattactcacagatgaaatgattgaatggtcagaagaaaaacctgtaatctactcagtatctttagatgggaatgaatatgtgcataataaaaacaggatattacctacaaagaactcatttcaaataatcacagaaaatataaaaaaactacaacatagattaggtcgcgatagagtttcaacagttactacagtaacaaaggaattgcttcataatcctcaatcactgattgatgctcattttgaattagatgtatttgatctttttattaggcctataagcccttatggatttgctgagaaaaaagaaagctacacaatatctgagtatattaatttttatgaaaaattattagatattattttcgaggaaaataaaaaagggcttccttttgttgagcattctggtgctatacatataaaaagattatataatcctggtttttgtgggtatgctgatttaaaatcccctagtggtatagtatttaatagcttattattcaattatgatgggaaagtatatggaagtgacgaattaagaatgcttcagcaggtatactctgatattgacttttctttaggtgactttgattcgttatcatttaataaaaacactatctataataatttactttctaattcatttaacatgctacatgttggttgtgaaacttgtgcttttcagccatattgtggcgttgacccttgtcaaaatatcagtttatttggtgagccggttggaaataaaagtctttcacgattttgtctttatcataaagggatgtttaaactactagtaaaaaaaattgatgaagataatgcaggggctacattactaaaaagttggatttatgcttgaggttattaggaaagatttattcgatattagaagtaaattagacaatggctactatcaaatatttaaagatagactggtagatcctacattctatttagataatattcttgttcaacaagaaggaaagattttatcgtcgacactctgtaacggtgcaaaatatataatagcagatagtgaactttataatagtattgaaaatggtgatattatatctgtttcaaatagtagaattagagttattttatctcgcaaggcaaatcataatacgttacttgttactgagcgttgtaataatttatgtcaattttgttctcagccccctaaaaatagagatgattcttggcttttagatgatgctctacttgcgattgctgcttttaatttcgatggtgttattggaattagtggtggagagcctttactttatggcaataaatttattgattttattagagaaataaaaagattggcaccgaggacagttttacatgtattaacgaatgggcgaaggttttctgatatttattttacaaagaaattattatctgaagcaaaagatatgaatatttcatttgggatccctctttattcatctcataaagaaattcatgatgagttagttgggcataatggtgcatatgaagaaacaattatgggaatagtaaatgcaggtaatttaggcattaatattgaattgagaataatcccaacaaaaataaattatcttcactttcataatattgttgaattatgtgctagagtgttctcaaatattaatcaaatttctattatgaatcttgaacccgttgggtgggctaaaaaaaattgggataatttatatatctcacctgataaatatatagaaaatctgaatcttgctatcaacatggctgatattagtcaattacctatagctttatttaattatcctttatgtcatttacctaatagtttatggaaatatactattcaatctatttctgattggaagaattattatccgaatgaatgtgaccaatgtaaaatgaagagtcattgtggtggatattttagttcttcatatggaaaatatcatcaaacagcgagggcgatattatgaaaaagtggagtttagcagcactattacctggttttttaacgttaaatagtcaagctgttgctagttcaacagggctacctaattctgaattaacatttgaacctgaagatctcgtgtttgctcctttaaatacagaaacaccgttttatatagcagggcatagaagccatagttctcatcgaagccatcgtagtcatagctctcatcgctcttcatctgggggaggatattatcgaagtaccccttctacacaaagttattctcaaccacaaacaaccaatagaacaacttctaatttatctaataatgatttttcacaagcagttaagaattctaatgttaatcaggaacaaaaaaagcgcctgataatgagggtacaatatgccctatttgaaagacattattttaatgggatcattgatggtattatggggccaacaacacgtcaatctatacgtaactatagaagagatgcaaaattacccgctaatgtattaattgatgtagatttattaaattcattgggaatttatgcaacttattaaaagtatcaatggtaataatcatgaacattaaagtcggcgatgagtttttggtttatatggcattgggtgaagagagctatatgaaggaatattatcgtgtgttggagttagatagcgcattatcacaagtgaccggtaaattgctaagaaggacgacggcagatgataaaaatattgggttagggcgctgtgaattagaaggtgggattgaacaatttgcgttagaagatatttatccaatagagaagtgatcgaaataacgatcacttctacatcactttattaagcaacaggcacatcttcgggtaatgctgattttggtaagccaaaaattttgtcaaatacccagttatagacaaatgtatagcaagggatgatgataataagtgcaaaatccatcaccagtgcttgccataatgaaacccctagccaccaagctatcagcggaataaggtaaaccaccaacgtaagctgaaaacctaccgcatgagcaagacggcgtctaaaggtgcgaattctcgacttttgtcgactctcccaaaattcaaataaacagttataaataaaattccaacttaccgcgatagtggtaataatgagtgcgagtggccccgtaacagcggttgaactatcggctaaaagcgccagtcctaccgatgagataacccaaccaaatacttcataagcggtaacatagacaatttttcgcttaataccttgcatgatactctctttttttgtggatcagtgtggttaagcatcgtaagataaatcagtaatagtgacagaaaaagttagctaatatcaatttaactgaaacatcaggagtgaacatgcagttctcaagtgaacatatcgcgatatttttagccgttatggataaaggctctttttctgcggctgcgcgttcattaaaacgtgttccttctgcggtcagtatggcgattgctaatatggaggctgaattaggttatgcgctgtttgagcgttcatcgagagagccacggccaacagaaaaagctaaagcacttgaacctcacgccagaatgattgctgagcaattaaagctattacaggttcatgcacaagagctttcaatggatctggaaagtatattaaatattggtgtcgcggcagatattaatcccgattatttattaccggcattatctgagttaacacagcgttaccccttactaaaagtgaatgtagtaaccgcggcgcaagatgacattattgagatgctgcacgcacgtaaaatccaattatgtctcgtgtatggtgggttatacgtcaatggcgatgaacaatttcaatatttgggctctgagtcattagttgccacaatttcggcaagtcatattgcacttgctcaccctgcaggggtatttattgaagatttagtgaatgtaagacagataatgatagccagccatactcaagagataagagatgtacgctctttagtggcgactaattactggcaaacagataactttcaaatggcattaggtatggttgaagcggggatgggctgggggaatttaccttattcgctgatttatacgcagttacaaaagggaaaattaaaacaactgcaatttaaaaatactaaaaatgaattgcgcttaccggtacatgcaatgtggttaaaaggcgagtcactacaaaaaggggcaaaggaattggtggagttaatgaatattcaccaacccattgtgcccaattttgattaatccacacgttgttgatgaacccaaaccgcgacttcaacacgagattttaatttcatctttttgagtagatgtttgacatgtactttaacggtactttcagtaatatcgagtttacgtgcgatcatcttattggatagctcttgtgctatcagctttaaaatatcgcgctctcgtggggtgagttggtctatatcccgctcactttcagaacgatcttctcgcagtgactgcgctaaaatgggggttaatgttgggctaaccaccattttccctgcggctgcttgttttaaagcggctaatagctcttctggctccatgtcttttaagagatagccatccgctcctcgttttaaggcggtgatcagatcatcactgtagtttgatacactaaacacaacgatccgcccagagagcgatcgtaatcgcaattgatcgagtgtttcaaaaccattcatacccggcatattgagatcgagtaggattaaatcaggatctaactcttcagctaattttaccccttgaataccatcgccagcttcaccaacgacagttaatgttgtatcaagacttaaaagttgtttcacaccattgcgtaacatcgggtgatcatcaattaataaaatagtcgctttgtctgcgactgctcccatattattcattatgatttgctcccttttcgataggatctttatgggtagtgattaacggaaatgtgacaaatacttgcgttccaccttctttgcgaacccttatactataagagccattcagactattcgcgcgttcacgcataataatcagtccgtagtgatttatcttttcgggattaggcgtaataccttcaccattatcattaatttgcagttcaacgatgccattattaagtgttaatgcgacttcagcccagtttgcattcgcatgttgcagaatattatttaatgcttcacgaacaatttgcaccacatgaatactttgatgtgaattaacacattttgcaggtaactgataatcaaaatggatagcaaaccctaaacgttgattaaattcatttagtgtattttctaatgcggctaataagccaggctctgtcaatttcaagcgaaatgtggtcagtaattctcttaactgacgataagccacatttagctcttctcgcatctcttttagtagtttttgacagttatctggcaaggtttccgattgcatttgtagataactgacctgcatttttaaacatgatagcgattgagcaatcgaatcatgtaattcacgtgcaatcgctgaacgctcatccattaataatagctgttgttgctgttcattttgttgctccatggcaagcattgcggaaatttgcttagtcaataagagcattaaattattctgttcgtcagtaagtacactattttccggtaactgcattacgaataaaccgtagcgatggatctgatcggtcaattcccaatgtaataagcgattatttaacggtgtagtgatgttggcatcttcattgcaacgctcacagtctggcgttggacaatattcagggcgtgaggaaggggctaagcttatctcattaaataatgtatgttgattatcttcatatagacggatctgcaaatagctatcaggaataatatgctgtagctctgcaaggatctgccttaagcgagcgcaaagtggcgcttgggaatgcagttgttgacttgagtgataaagataagagagaaccttatttttctgttgtaaatcatgggtcttttcaatgactcgttgttctaattcactgtagagcgtcgatagctcttctgacatggtgttaagtgcaattcctagggtggcaatttcatcatggtgaggacgaggccgaaaacgagttgaaaaatcaccatgtccaatagaattagccatggacatcaattgttgccaaggcagtaataagcgacgacgaaaatgccaaacagaaccaaacagcagtaataaggtaagagcggtaaagataagttgagtataagcgactaggcggattttttgttcagtaagttggtcaatacttgatactaatgtatcgagttgagaaacaaaaaagataacttcttgtttcgcatcattaggctgtttggctgctgacaaagtcggttttaatgtctctttccagtaatgagtcagttgtacatattgtgattgcagtgatgaggtgcttaatacttgacgtaactctttactatctaaatcattttctaattcttgtagataatcacggtgcttatcatcaaggggtaaggctgagagtaaacgatagctttgcatgcgcagtgagccggatttattaatggcgtgggcattgccttgtacgcttaaaataatgtggttagaaatagccatacctaccacaccaaatagtgtgaaaagcaacattaaaatagcgatttgattaataattgaaaagcgataatgccattgaatgttgtgcattttcatgatgtattcccagtttgatctggtctatcttgccttaaaaaaccgctaaataacatatactccaaagggagtacctctaaatatctaagtattgtaatgtgtttaataaagagtaagtgattttacctaatttattgatttacatttaaaatagtcacgtaaccctattaatacttaggtataaaacatagatttagatgaaaaatcaaacaaaatcttgcttgatgcagatcatgactcgcaaacccatctcaccgtaaaaagaagccaatttaaccgttaaccgaggttgttatggcactttctcaacacccagaaaaaatgaaaaaaggggtgatcgaaaattggcatcctgaagataaagctttttgggaaaaaactggtcaaaaaatcgcatcgcgtaatttatggatttctgttccttgtctattgctatccttctgcgtctggatgctatttagtgcagtcgctgtcaatttaaataaggttggctttaattttaccactgatcagctatttatgctgactgctctaccttctgtttcaggtgcgctactacgtgtcccttactcttttgttattcctatttttggtggtcgtcgttggacggctattagtacggtatttctgattattccttgtctctggctagggtttgccgtgcaagatctcacgacatcttattccacttttatcgttatctctctgctgtgtggttttgctggtgcaaacttcgcatcgagtatggcaaatatcagcttcttttttcctaaagcacaccaaggcggtgcattaggattaaatggcggattgggtaacttaggtgtcagcgtgatgcaattaatcgcgcctttggttgtcagtgtgggcgtttttgctatgtttagtggccccggtgtcgttcaacctgatggctcacgtttatggctagagaatgcggcgtggatttgggtacctttcttgcttatctttacctttgcggcttggtttggcatgaatgatctggctgctaataaagcttctttaagtcaacagctacctgttttaaaacgtggtcatctttggttactcagtatcctctatctgtgctcttttggttcttttatcggcttttctgccgggtttgcaatgttatcgaaaacccagttccccgatattgtcattttacattatgccttctttggtcctttacttggagcattagctcgccctgtgggaggtgcgctatctgataaatttggtggcattaaagtgacgcttatcaactttatcattatggctattttctcagtgctcctgttcttaaccctaccggaaaatggtgctggtggatcgtttattgctttctatggcgtgtttatggtgctgtttttaactgcagggctaggcagtggttcaacattccaaatgattgccgtggtatttagaaaaatcactattgatcgcatgaaggcacaaggggcttcagatgaagctgcgcaaaaagaagccgtaacagaaagtgcagctgcattgggttttatctctgcaatcggtgcgattggtggcttctttattcctaaagcctttggtacatcccttgcgatgacgggttcacctgctggggcaatgaaaatcttcgttctgttctatatcgcctgcgttctgatcacttggttggtctatggacgtaaacacaataaataataatgacgaattatacgcaatgtgagcgcgctaacgcgcattgggagagtatctgatgagtaaatttctcgatagattccgctattttaaacagcttggtgatacgttttcacaagatcacgggcaagagttaaatgttaatcgcgactgggaaaatagttatcgtagccgttggcagcatgacaaaatcgtgcgttctacacatggtgttaactgcaccggatcatgtagctggaaaatttatgttaaaaacggcttagtaacatgggaaacccagcaaacagactatccacgaactcgtcctgatctgcctgatcatgaaccccgtggttgtccgcgtggtgcgagctattcatggtatttatatagcgctaaccgcgttaaatacccaatggtacgtaaacgtctgatcaaattatggcgtgaagccaaagcgcaacacgctgatccagttgatgcatgggcatcgattgttaatgctcccgaaaaaacgaaaagttataaacaagctcgtggtcgtggtggtttcgttcgctcttcatggtctgaagtgaatgaaattattgctgcctctaacgtctataccgctaaaacttttggcccagatcgtattattggtttctcacctattccggcaatgtcaatggtgtcttacgccgccggtgcccgctatttatctcttattggtggtgcttgcttaagtttttacgattggtattgtgatttaccacctgcctcaccaatgacttggggggagcaaacagatgtgccagagtcagctgactggtataactcttcttatctgattgcatggggttcaaacgtacctcaaacccgtacgccagatgctcacttttttaccgaagttcgttataaaggcaccaaaacggtagcagtaacacctgattatgctgaaattgctaaactgtgtgaccagtggttaaacccaaaacaaggtacagatagcgccatggcaatggcgatgggacacgttattcttaacgaattccacgttaaacgccaaactgaatactttagtaactatgtgcgcatttacactgacatgccaatgttagtgatgttagataagcatgattctggcaaattagttgcgggtcgcatgctacgtgccgctgatttagtgaacaatctcgatcaggagaaaaatccagaatggaaaaccattgctattgatgagaaaacacagcaattggtcgctcctcaaggttcaatgggttttcgttgggaaggcgctgccaaatggaatctagagcctaaagacggtaagagtggcgaagaagtcactttacaattgggtcttttagaaaatcatgatgatgtggttgacgttgcatttccttactttggtggcatcaagagtgaatactttgaaggtgttgcccttgatgatgttctcgttcatagactgccagcaaaacgcattactcttgccaatggcgaagaaaaatatgtcactaccgtttatgacttattactggctaactatggtgtcgatcgtggtttaaatgatgaaaactgtgcgacaaactatgatgagatcaaagcctattcacccgcatgggctgaacaagtaacaggggttagccgtcaagatattatccgcattgcacgtgaatttgctgataatgcagaaaaaacacatggtcgttcaatggtgattgtcggtgcgggcattaaccattggtatcacatggatatgacctaccgtggcattatcaatatgcttatcttctgtggttgtattggccaaagtggtggggggtgggctcactatgtgggacaagaaaaactgcgtccacaaacaggttggttgccattagcttttggtctggattggcagcgtccacctcgtcatatgaatagcacgtcatttttctataatcattcaagtcaatggcgctatgaaacggtatcaccgacagaattactatcacctttagcagataaatcacgctttagcggtagcttaattgatatgaatgtgcgttcggagcgtatggggtggttaccgtcagcaccgcaattaaacgttaacccattgtctattaccaagaaagctcaacaagctggcgtcagtgcaacggattataccattaatgctctgaaatcaggtgagatccgttttgcatcagagcaaccggataatccgcaaaacttccctcgtaacttatttatctggcgttctaatttattgggatctgcaggtaaagggcatgaatatttactgaaatatctattagggacggaaaatggattacaaggtaaagatttaggtgaacaaggccaagttaagccacaagaagtggaatggcaagataaaggcggtgagggtaaggtcgatttagtggtgactttagactttcgtatgtcaagtacctgtctgttctccgatatcgtgttaccaaccgccacatggtatgaaaaagatgatatgaatacctcggatatgcatccatttattcatccattaaccgccgcggtagatcccgcttgggagtctaaaaccgattgggaaatttataaaggtattgctaaaaccttctctaaattgtgtgtcggtcatttaggggttgaaaccgatttagtgacacagccaatacaacatgactccgcggctgaaatggcacaaccatttgatgtcaaagattggaaaaaaggtgaatgtgaccttatcccggggaaaactgcaccgcatcttattcctgtggagcgtgattatccaaatacctatgctcgttttacctcacttgggccgttaatggataaattaggtaatggcggtaaagggatcggttggaatacacagacagaagttgatttcctgaaaaaacttaatcgcgttcgtcatgacggtgtggcaaaagggcgcccggcgattgaaaccgcaattgatgcagccgaagttatcctctctttagcacctgaaacgaatggtcaagtggcggtaaaagcgtgggatgcactaagtaaagtaacaggacgcgatcacactcatttagctaaagtaaaagaagatgagaaaattcgtttccgcgatatcgttgctcaacctcgtaaaatcatttcaagtcctacatggtctggtctggaagatgagcatgtctcttataacgcttgttataccaatgttcacgagatgatcccttggcgtactttaagtggccgtcagcagttatatcaagatcatgagtggatgcgtgcttatggcgaaagtttagtggtttatcgtccacctattgatactaaggcaatcgaagccgtgaaaggtaaaaaaccgaacggcttcccagaaaaagcgctgaacttcctgacgcctcaccaaaaatggggtattcactcaacgtatagcgataacttactgatgttaaccctcggtcgtggtggccctgtggtttggctgagtgaagatgatgctaaagagatgggtattagtgataacgattgggttgaagcatacaacagtaatggtgcgttaaccgcaagagcgattgtgagccaacgtattcctgatggcatgatttatatgtatcacgcacaagagcgccaaataaacctaccaggctctgaaataactggaatgcgtggcggtattcataattccgtgacgcgtgtttgccctaaaccgacccatatgattggtggatacgctcagttggcttatagctttaactactatggaactgtgggctctaaccgcgatgaatttgttgtggtacgtaagatgaaacagattgattggcttgatggtgaaggcgatgcttatcaacaaaccctgaatggacaggagaaggcataatgaaaattcgttcacaagtcggtatggtactgaacctcgacaaatgtatcggttgccatacctgttcagtaacctgtaaaaatgtttggaccagtcgtgaaggtgtggaatacgcttggtttaataatgttgaaactaaaccgggtacagggtatccgcaaaattgggaagatcaagagaagtggaaaggcggctggatcaaaaatattaaaggtaagttagtaccaagaatgggtaaccgtgttgggctattatcaaagatttttgccaacccagatgtgccagcattagatgattattatgagccatttgattatgactatgagcatttaaaaaatgcaccagaaggctcattacccaccgcacgtcctcgttcgttgataacaggtcagcgtatgaccaagatcgaaaaaggcccaaactgggaagatgatttagggggcgaatttagcaaacgtgctgcggataaaaacttcgccaatatgcaaaaagagatgtatgggcagtttgaaaatacatttatgatgtatttacctcgtttatgtgaacactgcttaaatcctgcttgtgtcgcgacctgtccaagtggtgcgatttataaacgtgctgaggatggtattgtgcttatcgatcaagataagtgtcgtggttggcgcatgtgtttaacagggtgtccatacaaaaaaatctactttaactggaaaagcggtaagtcagaaaaatgtattttctgttatccgcgcatcgaatcaggtcaaccaaccctatgctcagaaacctgtgttggacgtattcgttatcttggtgtgatgctgtatgacgcagataaaatttcacaagccgccagtgctgataatgaaaaagacttataccaaagtcaattagatatctttttagatcccttcgatcctgaagttattaaagctgcagaagagcaaggtattccattaagtgtgattgatgcagcccaacgttcgccggtttataaaatggcggtggattggaagctggcattaccattacaccctgaatatcgtactttacctatggtgtggtatgtgccacctctgtcacctattcaatctgcggctgatgcaggagtgttgccacatacgggggtattaccggatgtagaaagtttacgtattcctgtccaatatttggctaacttgctgaccgcaggcgatacagcgccagtgttattagcattaaaaagaatgttggcaatgcgccattataaacgcgcagaaacggtagaaggtaaaaccgatttgacagcattagagcaagtgggattaaccgaagcacaggcacaagagatgtatcgctatttggcgattgccaattatgaagatcgctttgttattccttctagccatcgagagttagcaagagaagcttttcctgagcgtaacggctgtggttttagttttggtgatggttgtcatggcagcgagagtaaatttaatctgtttaatagccatcgtattgatgccatcgatatcacttccaaaacccctcaagatgagcgccgttctgaggagaaaatatgatgatctctttgaaagttatttctctgttattggattatcccagcgaagatctctgggaacatcgtaatgagatcattgatgcattgcaggaagctgacgagcttcctgtcacgcaagtcgcaaaattaatggcgtttattcgtgaactcacgcaacaagatctgctggatgcacaagcgaattacagtgagatttttgatcgaggtagagcgagatcgctattgttatttgaacatgtacatggtgaatcgcgtgatcgtggtcaggcaatggttgatctgcttaatcagtatcaacaagcagggatcaccttaagtagtcgtgaattgcctgattacttacctacttaccttgagtatttaacgctattgcctaccgatgaaagtattgaagggcttaataatattgcccctattttggcattgctgagtgagcgtttaaaacagcgaggcagtgattatcacgctctttttgatgtattgctttgtctctcacaaagtgagttagacgcttcacaactggcggctcaagtagaaaaagagcctgtagatgatacgccggctgcattagatgccgtatgggaagaagagcaagtgacgtttctaggtgaaagtgcgcaatgtggtagtaacaatattagccagcatcagcgacgttttgcgcaagaaacgcctgttcaatatctcaacgtcggtaattcgctggatatgggagcacaaaaatgaattacgttaatatgttgttttttgatatctacccctatattgctggtgctgtttttcttatcggtagttggttacgttatgattatggtcaatatacatggcgtgcaggctccagtcagatgttagacaagaaaaacatgcgacttgcttcgaacttattccatattggtattatcggcatttttgcaggccattttctggggatgttaacgccacactggatgtatcaatcttttctaccaattgaatataaacaaattatggcgatggttggtggtggtacttgtggtgtattaatgctgattggcggcattatgctgttaaaacgtcgtttgacgaatgtacgggtaagagcaacatcgtcatttggtgacatcatgatcttaaccttgctggttgtccaagttgcactcggcttattgactatcccattctctgcacagcatatggatggtagtgagatgatgaagctggtggcatgggcgcaagctattgtgacattccatggcggtgcttcggcaaatcttgaaggtgttgcacttatttttaaattgcacatattcctaggtatgacgatttttttattgttcccattctgccgtttagttcatatttggagcgtgccaattgagtatctaacgcgccgttaccaaattgttcgtaatcgacactaaaggtatttttctcctgagttgatttgagacttttaattgcgcttatctcacccccgcccgcgggggttttttttaacttaaacaaattttttgaatgcttaaagcaataatctttagatacattatttccatagtcagcttatactcgcttttaacgacatcaagattattttttaaaatgtcattatgttatttaaatatcatgatatttaaataattatatatattttccttaatgacctaatttttattaagttacatttgatttatttaattattatatattaaaaaatcagaacgattattttaagtttctataaaaatagagtttatatttattcttataatctgagcgttgtttcttaaactataaatataatccattaattcctacatagggggagataatgaaacatacattgttaaaaacgactgcaattgctatggcattaagtgtgggagttgtgcaagcgactgaatataaagcgagtaccgcagaacatccaatcaaaatagttaatttagatgctcttgaaaatcaagtaaaagaaaatatggataaaggcgctttcggttatattcgtggtggtgctgaagacgaaaataacttgcgttctaatacaaatgcatttaataaaaaatatattatgcctcgtgcattacaagggattgaattttccgatctgaatttaaaaacagaatttttaggtattaaattagatacgcctattattcaggcaccgatggcagcccaagggcttgctcatcaacaaggcgaagttgccacagcaaaaggtatggcgaaagcgggctctattttctcattaagtacttatggtaataaaaccattaaagaagtcgcgcaagcacaaccgggttatccgttcttttttcagctatatatgagtaaaaacgacgcgtttaatcagtatattttatcgcaagcaaaacagtatggcgcgaaaggtattattttaacggttgattctcctgtggggggatatcgtgaagatgatattaaaaatagttttcaattcccattaggttttgccaatttggaagcattcgccaaaatcagtgatgataaatcaaaaacaggtaaaggttcgggtattagtgagatctatgctcaagctaaacaagcatttactcctgcggatattcaatatgtgaaaaagatgtcaggtttaccagtcattgtgaaaggtattgaatcacctgaagatgccgatactgcaattaaagcgggtgctgatgcgatttgggtgtctaatcatggtggtcgtcagttagatagtgcacctgcaaccattgatgtattgccagccattgccaaagtcgtgaataaacgtgttcctatcgttttcgatagtggagttcgtcgtggctcacatgtctttaaagcgctagcgagtggtgcagatgttgttgctgtggggcgtccaattctttatggattaaatttaggcggtgctgaaggtgttaattcagttattgagcaattaaataaagagttaagaattaatatgatgttaggtggtgcaagaaacgtcaaagaaattcaagcaacgcacttgtatacagatgctgactttaaataagccattattttaatctcagcgagtaaaaaccccatgcttaatcttaaacatggggtttttattgattagacacgacttaatatgcttcgctagctatgtcaccaaaacagagattattttgattattaatccccccatcgggtgatgagtaacctagacagcctaatatcgagtcaaaaatattatgatgatagaaagtccggttattatcttgatttcgtttgagattatcaaataactgtttattttcaggctcagctaaatagctatctgacatccacactaagaaaggcactttaaattgttctggtggtgcaatttcttttggtgtgccgtgtaagccacctttttctgaaattgactcgccgtgatctgaggtataaaacacaatggcttttttatcacgcaaggtattaagtacaccatcaataaagtaatcagtataaagaatagagttatcataagcattgattagctgctctttggtgcactcatcgtcaacgtttaagcattcaggttggtattttttaaatgcgtttgggtaacgttgcgagtacataaagtgtgaacctttagtgtgtaaaatcactaagtggttacctttagaatagtgagcaacggaatctgcgacttcgttaataagcaaagtatcatctaattctttgccaaaattactatttttggcggtcatcatctctttcatggcatagttatctaaatcaagcttattgtaaaaccaaagctcactttgcattgaaaagagttctgatgtcattcctagctgatgtaatactgagaaaatattgttctcttttaacgttcgctgatcgttattttctgtaccgttttcacgcacaaacatacattttagcgaaagttttgttgctgtatcgcaagagatacctttcagagcaatcagatttttttcttggcttaataggggattggtttgtctttcataaccgaatagccccatatgatcccaccttgctgtctcgccaataataaagaccacatagacatcttcattggcttttgacgggatataagtaaagttatccgcaggatcaaagatattctggctattaaagtgatcgtcgtactgtgttatcgcatattgaaataaaggaataatccagttggtcggtaaataggcgtaacttaaaccaccgctgtagcttggcaaatctaagttattcttgatttcataggctttttgtttcgaatctaaggtttttagataggcaaataccgcaagagcaattacgagcattttgaccgtatttttgatccagatttttttcttttgctgctgagttatatttttttctggtttcttacataaccaagttagcgctaggggtaaaatagataacccaataatccaaataatcacattagggctaatcagctcttttgataaatcgatatctgtggtgagcgtagaaataataatgccatagccaataactacatcaaagaaagagatatagtaactagcacaaacactaatgagcagaataaaagaagcgactattttaaaaaatagtgtgccacaaaaagaaataagtcgtaataagaagaaagtaaaggcaatgtttactgcaacttcacccagtatatataaactttcaatgagggagttgtgagaattctgtgtgccataacggccaatgtaaacggaaagattaagaaataaaccaatatagacagctaaaaaaagagaaactttttcttttgaaaatcgtaaaaactttaatttttgcatgttgagctattatcaaatttttggggtgtagaggtctttaagaccgcattgttgttttcaggttcagtattatgggctttttttttattgtttttcaccttttttcttgcgaataaattgttattcaaaatattaattcttaaaaatttacctaaataagaatatagcaagtcaaattatcatattgtcatcaaataatgatgtgtttagttgttaaataaaaataactaattgtatttattgaaaaataataattttattgatgagaagaatacatagagaaaatcgtgttaattagaccgattaatctttgctattactgcttgctcatcgtcgacagaaaaatcgtcattagtgtcgataattgtttcctttttgtctcttactcatcttattactgataactgtctgttatttttctttgtttttcatctaattataaaatatttaaaataatggcttatttggcacagtctctgcatagataaaggagagaatcgggtattaacctgaaagttgatgaacacaggagcaatgttgatgaaaaaagtcatcacggtctgtccgtattgcgcctcaggatgcaaaatctacctgaaggtggaaaacggtaaaatcattggcgctgaaggagccaatggtttaacaaaccaaggtgagctgtgtctgaaagggtattatggatgggattttatccatgatactaagatactgactccacgccttaaaacacctatgatccgccgtgaaagaggtggaaaattagaagcggtttcttgggatgaagctattgagtttgcgagtagcaaactacttgctatcaaagagaaatatggcgctaaagctattatgacaaccggttcatcacgaggacctggtaatgaagctaacttcgttatgcagaaatttgctcgtgcggttatcggaaataataatatagactgctgtgctcgtgtctgacacggcccttcggttgcaggtctgcagcgttcggtcggtaatggtgctatgagcaactcaatcgttgagattgaggataccaaatgtctatttgtcttcggttataatgccgcagactcgcatcctattgtcgctcgccgtattgtgaaggcgaaagaaaagggtgccaaaattattgtatgtgatccacgctatatcgaaacagctcgcttggctgatttacacttagcattgaaaaatggttctaatattgcactgctaaatgctattgccaatgtgatcatagaggaaaaattatacgataaatcctttattgaaaatcataccgagcaatttgatgagtattgccaattagtcgcaagttacacccctgagtcggtagaaaaaacaacggggttaagtgcacaaattatccgtgaagcagcgcgtatgtatgccaaagcggaaacggcgacaatcttgtggggaatgggggtaacacagttctatcaaggggttgaaaccgttcgttcactcactagcttagcattattaaccggtaatcttggtaagaaatatgttggggtaggtcctgttcgtggtcaaaataacgtacagggtgcttgcgatatgggagcactacctaatacgctaccaggctatcagtatgttactgatgcgaaagcgcgtgaaaaatttgccaaagcttggggcattgaatcgatgcctgaagaagtaggctatgcgcttagtgaagttcctcataatatcgaccatggtttaattaaagcacactatgtgatgggggaagatccactacaaactgagccagatttagccactattcgtagaacctttgaaaaactcgatttactgatagtacaagatatctttatgaccaaaacagcatcgattgctgatgttgttttccctgccacatcatggggtgaacatgaaggggtgtacacatcagcagaccgtggattccagcgtttctataaagcggtagagcctgttggtgatgttaaaacagactggcaaataatcagcttaatggcaacagcaatgggttatccaatgcattacaacaacaccaaagaaatttgggatgagttgcgtgagttatgcccgatttattatggtgcaacttacgaaaaaatggctgatttggcgtatattcaatggccttgcccaacagaagatagcccaggtacacaatatctttatgaaggcggtaagttcgatactcctaatggtaaaggtcaattctatacttgtgagtgggcgccacctattgatcaactctctgatgagttcccaatggtattggcaacggttcgtgaagttggacattactcttgtcgttcaatgacaggtaactgtaaagcattagctgcattggctgatgaacccggttatgttcaattaaacactgaagatgccaaacagttaggaattaaagatcaagagttggtttggatacgctctcgacaaggtaaggttattactcgtgctgcggtcagtgatagaccaaataaaggtgcggtatatatgacttaccaatggtggattggggcttgtaacgaactagttgcagaaaacttaagtccaataaccaaaacacctgagtataagtattgtgcggtttgtgttgagtcaattaaagatcaagctcaagctgagcactatgtaaaaacagaatataacaatattaaacgtcgtttaagagaagccgctgaaggctaactttgctgattaatatttattttctgttcgaaaaccgagcatgactgatctagatatcagtaagctcggtttttttatcgctttatgcttaggctacttgcttatttaaatgtaacgttagtggtaaatcgggatgtaattgggttgaatcaaactgatgtgatggatgagtgtctacggttggataacgggataataacacaataaaatcctgataagcagagtggtgattgtcatgcgtaaaaataggtgtaccactatgatttaactcattatccgcaattaacaatatatccagatattgggcattattatgctcatagagaacattattaggattaatatcttgccaaggtgtacctattgcttcttgaggagaatgaacacgtaatgcgccggaattattttttacattatttttattcatcatgacaatcattgtgtgatcaacaccatctttatgcaccccttcaatagaaagctcacttaacgaattaggttcagcaatgagtcttaaatgaaataccgttgaaattgatttaggggattgttgatcggttaagcggcgtggcgtaaatcgatttccttcaatcaggagcatttttaatttcaataatgcttggtaggcggtattgctttgccagcgatcgtcaattgctcgaaagtgtctttgtgcaccgctatcttcacgaataaagccatcttcttcagtgaggacaaaaggttgatactctagtcgtgaaatggttttagcctcattatcgaaaaggtagcgtccggtgcgagagtgacgaaacgacaatgtgggatcttgcgcgagataatcaccatattctatgagtgtatctatatctttctctgttgcacctaattgttttattaaatcaataactattttttgtggaataaaaacatatttattatttttatattcttcttttattttattaattttattcgtaagcaggtcattcataggtaatatgctccatggattatttatattcttataataagttagcgttaattaactagtgataataattaaagaaatataaccactaaaattatagatagggataaaaaagttgccaatggacagaaaaaaacgagtgtaacaaattaattacactcgttttacaatatcggctgtagtggtcgtaaaactaaagaatttcaggaatggaaatacctaagcgttgcatacgtgataataaggtggttctttttaatcctaattttaatgccgcacctctggcaccagccactacaccgttagtttctctaagggcttgtattatccgctcacgctcttcatcatcactttcaggtgcgctagtttgcatctttttttctatggctgatggttgcgaaagcacttgttttaaacgagatggtttattgatatttaactcttttagttgcaaatttagcgtagagcctcgagttaaaataaccgcgcgctcaataatattttcaagctctcgtacatttcccggccaaggataatgggttaattgctccaaagcatgtgttggaatacagtctatttttctatccatgcggcgggcaattttttgcgtaaaatattttgccaataaggggatatcttcaggccgctcccgtaatggcgggataataataggaaaaacattcagacgataatagagatcttctcgaaattccccttcatccgtcagttcacataaatctttattggtcgctgcaattaagcgtacatccacaggaataactttattaccacctaatctttcgatttcacgctcttggagaacccgtaatagttttggctgtaattcaatgggcatatcgccaatttcatcgagaaaaagcgtacttttatctgccatttcaaatcgacccacatgggcatgtgttgcacccgtaaaagcgcctttatcatgtccaaaaagatcactttctaacagaccggaaggtactgctgcacaattcatttttatcatcgtcttatttttacgatgacttaaacgatggatcgctcgtgcaattaactctttaccagtacctgtttcgcctaagataagtacagtactgtcactttgagcgactaactcaatttgttctagtacattatgcatggcatcgctttgataaataatctcgctaaaactaccatttctatttatttgttcattaagccaaatattttcgttcttaaggctatctttaaggtgagttatctcttcataagcggcggcattttcaattgcaatcccgatgcgcgcggcaatttgttgcaataattgacaagtttcttcagtaaaaacactacttatttcatgcgctaggattaataaacctagcggtttacggttaaaagccagtggcaataacaaagccgtctgcatattttgttttacgagacgtttaatcaaaacatcgtcttgatcttctttattgatatcgattaaaacgggtttgttttgatgaataatttcttcggctttgttattggcgctactgaacttacgttgttgacgaatgacagattttcctgtctgataacgactagaataaagaataccttcatgactattttgtgatgaagtacgacataacatcagactaatatgattaagtccgaaaaaacgatgtatttctttagatacttcagaaatgaggccatccatgtctagatgcgctaatacagaatttgtaatatcgacaagtatacgatattgattccgctcactgcgaaggctctccatagtttcagcattgttactgcttaatttcatgacaccaccgattgccctaaaaaattaactatattgtaatcgctttattataaatttatatcaatgactgagtcatttttgatccaaaccgctattttcttatttaacgggaaagtaaaaaatataaatttaacaaatcgatatatatttatttatatattgattgattagatcgtcaaaaatgtcgaataaattgacgaaatataattttcctaattaataatcatttttatttgcaaattagttaattgaaaaataaggattagttaatttaaaaatagattggcatgaaccatgctatatctaatatatagatacctaattgttattctaaattagataattaattgcgtttatcgccaatataacggctatatataacaaacagcaggagaatatgatgaaccgtttcatcattgcagaccctaaaaagtgtattggttgccatacctgtgaagtagcatgtgttgtttcacatcagcaagcttcccaagataatttagcaatcgaccaaattagtgagcaaaatttccaaccacgcattcatgtggtgaaaggcttttcaattagtaccgcagttgtctgccatcaatgtgaagatgctccttgtgccaatgtctgtcctaatggtgccattattcataataaagattattactatgtcgatcaggataaatgcattggttgtaaaacctgtgtcttggcttgtccttatggcactatggaagtggtttctcgtccggttatgcgtaaattaaccgctctcaatacgattgaagcatttaaagctgaagccaataaatgtgatttatgtcatcaccgtgctgaaggtcctgcttgtgttgaggtctgcccaacgcaggcattagtctgtattgatagagatgcacttgaagatatggttaaagagcgtcgtcgtaaagcggcttttgaaacaggcgctgatttattgttctaagatcaagaataaagcaactatgtcctgatactatagttgctattatttatcctgcttcaagtaaggtatagacatgcatgaaatcacgctttgccagagcgcatttgagataattgactcacaagctaaattaaataatgcgcaaaaagtaaaaagcgtttggatggagatcagcgcactatcttgtgttgaagtctctgcacttgagttttgctttgatattgtttgtcgagatactatcgcacaaggttgccagctacatattgaggttatcccagctaaagcatggtgttgggattgccatcaagtggtgactgtttcgacttttaatgcaggttgtcctgcttgtggtagtcaaaatttgcgggttgagaatgacgatgcaatgcgcataaaacaaatagagatcgaataggggttgttatgtgccttggtattccaggtcaagttgttgaagtgggaaaaaccatcactgaaaatgcattggtcgatgtttgtggtgttaagcgtgaagtgaatatcgcattagtttgtgaaggcgagcctgatacgatgattggtaagtgggtattagtgcatgtgggttttgccatgagtatcgttaacgaacaagaagcacaagaaacccttaacgcattgatggcgatgggggaagtcgaagacgatgtgagtgcttttctctatggtgaggaaagtacagctaaacgtgcttgagcaaatttaatactatttgcatggttgctgactttttcttatactctattttcacttttcaaaggctgggacgacccagctttttaatctgtatattcaggggacgaccccaattatcaataggggtagtttatgtcttggataattctctttgtcgctggcctattagaaattgtgtgggcggttggtcttaaatacactcatggttttacccgtttaacaccaagtattattacgatcagtgcgatgatcgtgagtatggggatgttatcgtatgcgatgaaaggcttacctgcgggtacggcttacgccatttggaccggtattggtgccgttggtacggctatctttggtattatcgtttttggtgaatccgccaatatttatcgtttattgagtttagcgatgattgttttcggtattattggtttgaaattggcgagctaatttttatattcacgcagtttagcgataaaaaaagccactcaatgagtggctttaattttatttatcaagcgattatagtgtaaaaacaccaataattgcgataacactaataattgctgcagcaccataaaatacccaattactagcaggtacatgcactttaaaatcgtgcaacgtatggtgaatacggtgtaatgcacaccaaactggcagaataatcattagcagtaagaaaatacgaccaataaaaccttggctaaatgccatgatacgatcgtaagtaaatgcttctggcgcaatacccatcgggattagaataccgagcaggataataattgctggagagacaatcgcactccacataccacctgcaccaaataatccccagaaaataggttcatcagagcgcttaggaagttgattctgattcattatttcctcctgggttaaacaattagcgccactgccagaataacgacagtcacgacgatggttagaccccataaaccacgaacgataggctcttgtggtaatttttcatctttaacgacgatattaacggctttcggtgcaagcttaaaccaagtggccgtatggaataccgttgcgataagggtcacaatattaatcagcatcactattgggttacttaggaatccaacgaatcccgcccaactttctggtccatttttcagtgcaaatacaccgaacagtacaaccagactgaaccaaagttgtggtagacaagttccttcacgggtgatgtagaaacgatagaaaccgagtttcgtccaccagtttggctgcataccacgaacataaggcttacgttttgttgtcatgtcttgtttcctccttaacgtggtttcagcatggcaatgacaaagtcttgcgcactggctgctttaccctgctgaatagccgcagcaggatccacatgttttggacagacttcagagcagtagcccacgaaagtacaagaccagacgccattctcaccatttaattgaggcatacgctctttagccccatggtcacggctatcggtattgtaacgttgtgctaacgtaatcgctgcaggaccaataaactcaggatttaaaccaaactgaggacatgctgcatagcataaaccacagttgatacaaccagagaattggtggtatttcgccatttgagcaggagtctgtttatttggaccttctgaaggcttacgatcatttcctaaaatgtaaggtttaatcgcttctaagctttcaataaagtgagtcatatcgacgacaaggtcgcgctcgacagggaagttacctaacgcttcgattctcaccccatttgggtagtcacgcataaaggttttacaagccagttttgggactcggttaaccatcatgccgcaagagccacaaatcgccatacggcaagaccaacggtaagacagatctggcgctaagttatctttaatataacccaatgcatccaataatgaggtttgctcatcgtaaggcacatcataagtgacgaaatgaggcgcatcatccgtttcggggttatagcgcatgacttccatcttaacgtgcttcatgtcatcagccattcgctttctccttattctgcttgtcttgtgcagtcgcttcaccaccatagacacgtttagcaggagcagatttggtgatcttcacatcgctatattctaaacgcggtgcaccttctgggttatagaatgccagagtgtgtttaaggaagttcacgtcatcacgctcagtacaaccttcgtcaagacgttggtgtgcaccacgagactctttacgattgaatgcagaatgcgccatacattcagcgacatctaaaccaaagccaagctcaattttatacagtaaatcagtattaaagacgctactggtatctttaatttctacgtgtttaaaacgttcttttagttcagtcagtttatcaatggttttttgcattaattcaggtgtacgatagataccgcaaccttcttccatggcttcacccatttcatcgcggatctgagcccaattttcagaacctttttggttcatcagttttttcagattgtcttcgatgtcacgagtttgtgcatctaatgctgatgcgttagcaggggttgcttcttgggcacgacgaacggcttcttccccagcaagacgaccaaatactacaagttcagccagtgagttagaacctaaacggttagcgccatgtaagccgacagatgaacactcacccaccgcaaacagacctttaatacgtgtttctgtgcgctgattagtctcgataccacccatggtgtagtgtgcagttggacgaactggaataggttcattaactggatcaacacccacatacgcttttgccagttcacaaatgaatggtaaacgttcatgaagttttttcgcacccagatgacgtaaatcaagatgcacgacatcaccacggtgagttttaatggtacgacccgcgcgccactcatgccagaatgcttgagaaactttatcgcgaggacctaattccatatatttattttcgggtttacctaatggtgtttctggtcctaggccataatcttgtagataacggtaaccatctttattgaccagaatacccccttcaccacggcaaccttcggtcatcagaatacctgagcccggtaaaccagttgggtgatattgcacaaattccatatcacgcagtggcacgccatgacgtaaggctatccccataccatcacctgtaacgataccgccattagtattaaagcgataaacgcgacctgcgccacctgttgccataatgacagcattagcacgaatttgaactttcgtcccttccatcatattaatagcaacaacaccacgagcgtggccttcatcaacaaggatatcgagaacgaaatgttcatcgaaacgttgaatttgtgggtattttaaagaggtttggaacagggtgtgtaacatgtggaagccggttttatcggcggcgaaccaagtccgttcgattttcatcccaccaaaacgtcggacgttgactgacccgtcttctttacggctccaaggacagccccagagttctagttgagtcatctctgttggacaatgctcaacgaagtaatcaacgacatcctgctcacacaaccagtcaccgccagaaacggtatcattgaagtgaaagtcgtaggagtcgtgagcctgagtcactgctgctgatccgccttctgctgccacagtgtggctacgcatagggtaaacttttgagatcagagcaattttcagttgaggatttgcttccgctgcagcaattgctgctcgtaagcctgcgcccccggctccgattatcgctatatcggcattaaaggtttgcactgcgcttctccattgttcaagtgaaaattggaataattgtctagaattcaattcactgacattattaatttagtaatgctatttttttaagctatccgtaacgaaaatgtttcactgccttgtgactacgcttgataacatcgttattatcattgactgtaattttagtataacgaaatgtaaggtacggaaatttgatatgaatgatggttttcccgtatttcacaaaaaaagtgtgatctacaccaagaattctcggttttactaataattaaccagataaacttgagcataaaataaaatatttaattctaaaataaaaataaagttagcaatgaataattcgtttttaaagtatagataatttgaattacaaagaacaatggttttttgttattgactgatttttaaggtaaaataaattatctttaagctgttttaatataatttaataaaaatataaacaaatagttaaaataaacttttactatttatctaaaacaaatcgatttgtcttattaattgttaataaaatattaataaaatctcttaaagattataatagccatcaaacttaacggcgctaaatattaaatagtgcttaaaattgataaaaaatagacttattttatataagaaaaatatgagtttattgttgaactcggttgagaaagagaattattctaatttttatttttgatacaccgttgcgctattagtggcataaaaagttgttatcgttattggcttgggatagacgtgctattgctagtgacgaaaaaacgcaaaaaagtagatgatttgtagaattgtattgattgcatttatatgtttgtcgatatttaatcaatataattggtgggaatgaaaatatggtacatcttttctggaagaaatttgtctgttgaagaggatgcgagtaaactgcacgctttgttttctgttggagtttttcgttcatgagtgaaatcgcggattggcagccaagcgcctcaatcgccaacttactgaaaaaggcgaaaattgtcagtaatattaggcgttttttcgctgatcgtggtgttttagaagttgaaacaccgatgatgagtcaggctaccgttaccgatattcatctatgcccatttgaaacccaatttgtggggccaggtgcttctcaagggctaaagttatatttaatgaccagtcctgaataccatatgaagcgtctattagcggcaaacagtgggccaatttatcaaatggggcgttgcttccgtaacgaggaagccggtagatatcataatccggaatttacgatgcttgaatggtatcgaccttgttttgatatgtaccggttgatgaatgaagtcgatgatttattacaagaagtgcttgattgtgaagcgtctgaatcgctctcatatcaacaagcctttttgcgctatctcgatatcgaccctttatctgcagataaagaaaagttacgtgaggttgcggcaaagcttgatttatcaaatattgctgacacagaagaaaatagagatacgctactgcaattactttttgtgtcaggtgtagagcctcatattggtcttgaaaaaccaacctttatctatcattttcctgcttcacaagcttcccttgctgaaattagctcagaagatcatcgtgttgcagagcgatttgaggtctattttaaaggtgtcgagttagcaaatggttttcgtgaattaacggatgctaaagagcaacgtcttcgttttgaacgtgataatcgtcaacgtgttgccatgggattacctgaacagcctattgatgagcgttttttagctgcgcttgaagctggattacctgaatgttctggggttgctttaggcgttgatcgcctgattatgctcgcactcggtgttgagcgtattagtgatgtgattgccttccctgtttatagagcataatttatttgctaatcagattaaaaagagagtttaggctctcttttttaatatgaataatatggaaaaatacgaaaaattggtaaacgagcatttaaacgagcataaaattagcctaaaacacaatatactgtgataacaaacgagtaaagcgtatggataatcggagcgattttcactatgagacacggtgagagtagcagagcaactcaagggaaattatcctgccctttattgataagagcaggataacagaaataaaggttatttagcttgtttttgtaagaacttaacccctaaatcagggaaatcagtaaataccccttcggcacccgcttggttataaataatgtcataaagctgatcgccatctttggcatatttaggtagtttatccactcgtaccgtaaatggatgaatggttaacttgttggcatgagcatcggcagccataccggttaaggtgattttatctggtgttgagtcttcttctactaacatatgataatcagggccaatgccatcagcataagtcgcaatttctttcatggcgccaggtttaaacatccagtcataactgtagtttgtccatgtgccatctggttgtttttcatatgtctcattccaatcggtataagcgattaactgaaccagttttaaatccatccccatttgtggcatcaattctgttttaatgcgttttagatcgttaggatcaaaggattgtagataaacattatcgctcttttgggtatagccatactgttttaagacttcgagaacttttttagtaatgtctttcccttcttgttcatgaaaccaaggtgctttgatctcaggataaataccaatatcttgtcctgttgatttgtttaagccttggataaactcaatttcttcttggaaagtgtggatgcgaaaatcggattttcccattgggaaacgatttggataactttggacttttttaccgtcaacaatatcgaaaccttcggtaaatttcagtcctttgatctcatcaagagtaaaatcgatagcatagtaacggccatcttttcttgctctgtctggatagcgttcagcaacatcggtgacacgatcgagatagtgatcatgcaagacaaccagttggttatcttttgtcatcaccagatcttgttctagataatcggcaccttgtgcataggcgagtgctttggcaggtaaggtgtgttcaggtaaataaccgctggcaccacgatgggcaatcactactttatcgcttgctgcttgtgcgattgtacttaaagatagagttaaaagaacgcccgccactaacggtttcagtttgaaaggtgtactcataaagttgctccattttcattttcgtacaataaagctatgtacagttggcaataaaaaagccacatcagaaagttgatgtggcttgatttttagagatgagatttaatcaatttcataaataatcagttaatgattattcatacttctgtgacatttcacgtttgtgtttggtttcatttatcatcacgataagtaataacacaacagataatacactaccgccgatcatgaccataaagccaccgtcccaaccgaagtagtcaacggtataacctacgatagcacttgccgcaacagaaccccctaagtaaccgaatagaccggtgaagcctgctgcggtacccgcagcttttttcggcgctaattcaagggcgtgcagaccaattagcataacaggaccatagattaagaaaccaatgattaacatacatgccatatcaatattcgggttacctgctgggttcatccagaatacgatagtggcaatggttactaaggtcataaagaataccccagttgcaccacggttacctttgaacactttatctgacatccaaccacacagcagtgtgcctggaatacctgcgtattcatataagaagtatgcccatgaggatttatccatggcgaaatctttgacttcgcgaagataagttggagaccagtccaatacgccgtaacgaagtaagtaaacaaatacgttagcaattgcaatcatccacagaagtttgttagggaaaacatacttcataaagatttcttttgctgtcagttcttgttcgtctgtttctttataatcaggtggataatcgtttttatattcttcgataggaggtagaccacaagattgtggtgtatcgcgcattaatgcaaacgcaatcatcgcgactaaaatagccgcgaatgctggcatatataatgctgctttccagtcgttaaaccatgccatacctaacaggaacagcaatggcggtaaaccaccaccgacgttatgagcacagttccaaatagagacgataccgccacgctctttttgtgaccaccagtgaaccatggtacgtccacaaggaggccaacccataccttggaaccaaccacacaggaacaacagcacgaacatgatcataatgctcgaagttgcccatggcacaaagcccataattaacatcacaatggatgcaagaataagacctgcgggtaagaagtaacgcgggttagcacggtcagagaatgaccccatgataaacttagagaaaccgtaagcaatcgagatccctgataaagcaaaacccagatcccctttagagaatccctcttctacgaggtaaggcattgctaaagcgaagtttttccttactaaataataagcagcgtaaccaaagaaaatccccataaagatttgccaacgtaaacggcgatagacaggatctatctgttcctttggcagacgcgctttatgtggcgcaggtctaaacagacttaacatattagcctccgatggcttttattttaatatgttgatattaaacaatgacaaaacgaacaacaaagtaatcaaaaaattttctttaacgaacgtaatagtaaacttgttgaagcaaatttactgtgaagtaatactcagttgtcgaataatttttcaagatgtgtaattttgagtgatatgttaactttatgaaacactttctggtaaataatttgtgattagtatcacatatgtcgttttaatttttcactcatgagcgtttctctttcgtttttgctcattatcaaacattaaccacattttttgtgtatcttatacactataattaacgttaaagaataattaagcgtttgctgaatgtaatgtgagagggcatctctatgatgagcggttcaccagtgacagaaacagatgtcattattatcggcggtggagctacgggggcaggcatggcaagagactgtgctcgtcgtggattacgctgtatcctactggaaagacacgatatcgcaaccggtgcaaccggtcgaaaccatggtttattacatagtggcgcacgctatgcagtgaccgatccggaatcagcgcgtgagtgtatagaagaaaacatgatcttaaaacgggtcgctcgtcattgtgttgaaaaaacggatggcctttttattactctccctgaagattcgttagaattccaacaaacctttattcaatcttgccaagcggcaggtattgatgctcaagccatttcacctgaagaagctattcgcttagagccttcggtgaatcctaatcttattggtgcggttaaagtacctgatggtacggttgatcctttccgcttaacggcggccaatatgttagatgcacgtgaacatggtgcgcaagtactcacttatcatgaagtgatgggcttgatccgtgaaggcgaccgtgtgaaaggtgtacgtgtttatgatcatcaatctaaaaatatgtatgagatccgcgcacaaatagtggccaatgccggaggaatatggggacaaaaaattgcagaatatggtgatttaaaagtccgcatgttcccagcaaaaggggcattactgattttaggacaccgtatcaataatatggtgatcaaccgctgtcgtaagcctgcggatgccgatattttagtgcctggcgataccatctcattaataggaaccacctcaactcgcgttccttatgatgaaatcgacaatatgtatgttacccctgaagaggttgatatcctgatccgcgaaggttcgatgctggcacctaaactggctcaaacccgtattttacgtgcttatgccggtgtacgtcctttagtggccagcgacgatgatccttctggccgtaatgtaagccgcggtattgtattacttgaccacgcacaacgggatggactcgagggctttatcaccataaccggtggtaaattaatgacttaccgattaatggctgaatgggccacaaacaagatctgtgagaaattaaatatttcagcaaaatgtaccacggctgaagagccattgcctggctctcgccaatcggcagagcaagcattgcgtagtgtggtgtcgttaccggcgccaattcgaggctcagcggtttatcgtcatggcgatttagccaataaactattgagtaatgagcgtattgataaaagcttagtgtgtgaatgtgaagcggtcacggccggtgaagttcgttatgcagtgaattctttaaccgtgaataatttgcttgatttacgccgtcgtactcgtgtgggaatgggaacttgccaaggtgagttatgtgcttgtcgcgcagcaggattattaaatcgtttacaagtcacaacgcctcatggctccgaacaacaacttgcccattttctaaatgaacgttggaaaggtattcgtcctatcgcatggggtaatgcgttacgtgaaagtgagtttaccagttgggtgtaccaaggtttatgtggcttagatgccgatatgattgataaaacagcttcagtggaggccgatgatgaaatttgacgttatcattataggaagcggattagcgggactgactgcggggatccgccttgctgaagcgggcaaatcttgcgccattatcagtaatggacaaagtgcgttacatttttcatctggatcactggatttattaacgcatcttcctgatggcacgccagtttctcatccgaaacaagcgttatcaacactggcacaacaagcaccagagcacccatatagtcgtattggtgaagcaaatgtcactcaattgatagagcaagcgcaaacgctgttatcaacaacgagaaatttagactataaaggtaacggtgatgaaaaccattaccgtattaccccggttggacgttctcgcatgagttggatgagcccacagcgcgtgccgacttatagcgttaatcaaccattcccatggaaaaaaatagcggtggtggggattgagggattcttggattttcaacctcagtttgcaagtagtactttaaatgaacaaggtattgaggccattccttatcacattcatttacctttattggatagactacgtgataatccaagtgagtttagagcaattaatattgcgcgctatttagataagcctgaaaacacgcaagcattagcagaagaattaattaaacacatagataatagtgttgaggcgattgtactacctgcatgtatcgggctagatgaagaagcgccagttaatttattacaagagtgtgtgggtaaaccaatttgtctattaccgacattaccgccttcattattaggtattcgcctacatcaggcactaaaactgcgttttcaacaagcgggtggtttgatcatgccgggtgatcgcgcagaagaagccgatttagtcggtaataaggttgtcggtattcatacccgtaatcatactgatatccctatccgtagcgagcatgtcgtattagccacaggcagttttttcaataatggcttaattgcggaatttgatcgtatttacgagccattaatggaattagatttattagaaagtttaccgcgtaatgagtggacacaagtcaatgtgtttgccaaacagccttatatgcgatttggtgttaatacagatagtcaattaagaccgttaaaatatggtgaagcgttagacaatgtctatgcggtgggggcgcttttaggtggttttgatcctctaaacgaaggctgtggtgcaggtgtctccatgataagtgcactctatgcagctcaacaaatattacagagtgataaatcgcagcacaccacatctgcggctgtggaggcagtactatgagtttacaagataccagttttgaaagttgtattaaatgtacagtttgtacgacctattgtcctgtggcaaaggtcaatccactctatccaggacctaaacaagcaggccctgatggtgagcgtttacgcttaaaagatcccatgctttatgatgaagcactgaaatactgtactaactgtaaacgttgtgaagtggcatgtccttcagatgtaaaaataggggatatcatttcccgtgctaaacttaactacaatcctaaaacacctaaaattcgtgatgctattttaagtcatactgatttaatgggaacgctctctacgccaatggcgccgattgttaacactattaccggattaaaaccagtacgtaaaatcttggataaagcgcttaaaatcgaccatcgtcgtgaattacccaaatactcttttggtacatttagaacatggatgaaaaaacaggttgaagagcaagcacgctttaaagatcaggttgcgtttttccacggttgctatgctaactacaatcaccctcaattagggaaagatttagttaaagtattcaataaaatggatattggtgttcaactattaaaacgtgaaaaatgttgtggtgttgcattaattgccaacggctttgtgaaacaagcgaaaaaacaagctaccgtaaaccttgaatctctgacagaaaaaattgtggagaacaacattccggttgttgctacatcttctacttgtactttcactattcgtgatgaatatgaacatattctagatattgatacttcaaaagtacgggaaaatatagaattagcaacacgttatatttatcggttattggaagaagggcgtgaattaccattaaaacataccccattaaaagtggtttatcataccccttgccatatggaaaaaatggggtgggcggcttactccattgatttaatcaaacgtattcctggggtagaagtgattgtattagattcacaatgttgtggtattgccggtacttatggttttaaatcggaaaactacgatgttgcgcaaggcattggggcgggattattccgtcaaattgaagagagtggttgtgatttagtcattacagattgcgaaacctgtaaatggcaaatagaaatgtcaacaaccaaaaaatgtgaacacccaattagcttattagctcgggcattgtagaaaaaattaatgagataacaataacgtagtcactgattacaataacaagcaatttgggaataaaagtcgatcttttattcccttttttattactttacatcacattgtgagtcaacagggtacagagcaccctgttggcgccattaatattaatctttaatataaccactcacgccctaattggtctgctgccataatcgccgcaaacactttatcggaatcaacatcaaatggcatattgtaaattgtttcaccttctgcacagcttaattctgcgacagccatgattttttcatttaattcatcacctgtagcatgtacgcctaattcttctaaggtaacaggtaagccaacttgaacacagaaatcgagtacttcttcgatctcttctaacgggctattttctagcactagttgaactagagtaccaaaggcgactttttcaccgtgatacattgcatggcactcttctaatgcagtgaaaccattatgtattgcatgtgcggcggctaatccggcactttcaaaaccaataccgcttaaaaaggtatttgcttcgataatattttcaaccgcagtagtacacacactacggctgacagccagtttggctttatagccatcttcaagtagggtgtgataacaaagctctgctaatgccagtgctgcaagggtggttttacctccagccattgtttgcttttgtgctcgactacaggctcttgcttcaaaataggtcgctaaggcatctcccatccctgccactaataaacgtggtggtgctgaggcaattacattggtatccataacaacgatatcaggatttttcgggtagaaaagatagctatcaaatgcgcctaattctgtataaataacagaaagtgcgctagtaggagcatcggttgatgcgatagtcggagagatcaccacaggtaactggcatttataggcgacggctttggcggtatcaagggtttttcctcccccaacaccaatgataacaagagcggcttgttgtttggctatctcaactaagcggtcaatctctttatgtgtacattcaccgtgaaactgttcaaagtgtccattgacttcatactgtgtcatgctgtctttgacgatgctgccagccagatccatgacaaacttatcagcgataatcaatgctctctcacccaaaggttttgtatatttcccaatatgatataacgcatcaggcccttggatatacttcgctggggattgaataacttttaacataatagactcctactatcttcaaaagagtaaaaaatctttatggcggggaatatcatcttaaccgagatggaaaaaagctgagatgatccagaatactattaatagtttaattgataataaaaatattatattgaaacgggttaatttttgtattgctaggcaataaaagtcttactctttatcattcatcaatagtagtgcggtgtcttcacttattatgctaaataatggtatttattgccggtagatcaaggtattggtaaaagtaagctaaggctttattgtgcaaagaataaagccttattgggggagtcaatcagctaaggacggatttgagcatagctttgttgttgattttcttgtgcaaaaaaatagcgcaaaataaagttcaataatacgccataggccggtaagaaaaacagcatacaaatcgtcaatttaaaagtgtaatccacgagcgctatttcgacccaattggccgccataaacgcatctgtactgcgataaaaggcaataaaaaagaaggcaacagtatctaagaaattaccaaaaaacatcgctgcacttggtgctacccaccatttttgttgctgtcttaaacgattaaagacagaaacatccataatttgccctaacacatacgccataaagcttgctgtcgctattcttgccaccatgatattaaaatcattgagtgaggcaaaaccttgccaacttccttggaaaaagagtgttgatattaggtaggaaatagctaatgccggtatcataacggcagtaataatgcgtcttgccagaggggctccatagatacgaacagttaaatctgtcgctaagaaaataaatggaaaagtaaatgcaccccatgtggtatggaagccaaaaatagaaataggcaattgaacaagatagttactagaagtgattatcaatatatgaaataacgaaagccataatagcgccgccgctttttggcgggaggtaaacctatacataaattgtacctttttagtgattggggtgagggaacccaataaaacgtatgattttctctcatcaggagaggatgcgcatcatactcttgttgcgcaacaaaagcaaagatcggcgataactcaacgtgaagttgatgaatgtgccgtgatgtgcgaggcaaagcgagatataatagtgctatctgttagtgcgaaaaaatggttaatacaatgaatgcccaatttgatgatgcgacaaaaacattagataccttaggactacgttgtcctgagcctgttatgttagtgcgtaaaaccataagaaatatggctcagggggaaacactgttggtgattgctgatgatccggctacagtgcgtgatattcccggtttttgtcgttttatggaacatgacctattacagcaagagacgcaagcaacaccttatcgttatttgatccgcaaaaaagagggtcagctgtaaatcagcttatcttgtaaaaaacacgcttatcaagcgagataaagcatggcttgtctcgcttgtggctctttctttcaaggcaaaagtagctctccttgcctttttatacctcatataaaatctatttacctcatgaataaatgcaatggttttatgatgaattagtcatgttttttctaagagattatttttctatatttataggtttatgtgaattaatagatttattgtattagtttcgtataagaaacaattaaaataattttatttatctcttttgtattattgtgaaaatagtatttaaaaatgtttgtttattcatcgttttaatgatgaagggataattattagttaattttttgctctttttgtttttcctaaaaatgctattttagtgttttttataatagagtttattttatttaatttgttttgtttcaataagatatattttcatttatttaaaatgccacatattgataaattataatcttgttaaaatatcttgaaaagttcattattcacagcgtattaataaatacaaaaacctctaataaataaggatctcaactgtatgtgttattaatctaatatttagactatttattttaatagccataaatagatgacgttcttaattaattcgttgtaccggaaaccattcgcatagggagtacggtattttttttatcagcacaattccactaactatgaaaaaaacaaaacatttatttaaaacaaagggttgtaatattccttttacttctgtgatgatggtaagttttgtcttaatgggctgtaacgatcaatcgactcagccaaccaagcctgctatcccagaagtgggagtctatactgtcaaagaggaaattcttccattaacggtcgatttgccagcaagaacggcatcttatcgtgtctcacaggtgcgcccacaagtcgatggtattttagaaaaacgtctatttactgaaggtagtgatgttaaaaaagatcaaccactgtatcaaatagataaaaaaccttacgaaactcaggtagctaaagcgcaagcggcttacgataatgtgaaaaaattagctgcccgttataaatctttacgtgccactaatgccattagtcagcaagaatatgacgatgtagtatcacgccttgatcaagctaaagccgatttaaatcaagcaaagattaaccttggctatacccaagttttatcacctattagtggcaaaatcagtcgctcttttgttagtgaaggggcattagtgagtagtggacaaagccagccattagcgaccatcacacagcttgatcctatctatgtggatattactcaacctattactaaccaactgaaattaaagtcactgatccaacaaggtgtcgtcactgatagtgaagataaaatggatgtgacgctgtttttagaagatggctctcagtacccttataccggtacattaagtttttccgaagtccaagttgagccaagtacaggctcagtgacattacgcgccaaattccctaatccacagcaccaattattaccaggaatgtataccaaagctcgcattatgcaaggaactcaagagaaagcgattgttgtgccacaacaagcgattacctttgatgcccgtggtaaatccatcacatatatcgttgatcaacaacaagtattacaagcaagagatgttgaaatattaaaaccacaaggtaatggatggatcataaaacagggattacaagctggcgataggatcatgacagaaggtcatcatcgtgcaaaaccgggcgtaaaagtcaatgcggttcctgctaacaacatttcattaaagaccaccttagagtaagtcttcatttaggtaatacattattatgtctcgattttttattaatcggccaatactttcgtgggtgatggctattgttattatgattgcaggaggattgtcgttaataaaacttcctgtgagtcaatatcctgaaattgcagctccagcgataatgatcaccgcagtttatcccggtgcatcggctgaaacagtgcaagacacggttgttcaagttattgagcaagagcttagcggattagatggcttccgttatttaagttcaaatagtaatacggatggtagctttgaagttatcgccacttttgaacaaggtacggatagtgatattgcgttgatgcaggtacaaaataaactgcaattagcaactcctaagttaccccttgaagtacaacgacaagggatgagggtagtgaaattccagattaactttatgcaagtggttgcccttgtagatgaatctggaaaattagatgcctttgatttaggtaattaccttgcctcacatatgaaagatcctatttctcgtattgatggtatgggggatattctgttattgggatcaccacgcgctatgcgtatttggcttgatccggataaactgactaattatcacctgatgccgcaagatattgccgcggctatccaagatgagaatgtacaggtgtctgccgggcagttagcgggcttaccggcattaaaaggtgttgagttaaacgcaaccattaccagtgcatcacgtatggtatcagtagatgaattcaaccatattctattaaaagtgaatcttgatggctcacaagttctgttacaagatgtagcgaaagtcgaagtaggggcagataatttctctatttcaagcttatacaatggtaaaccgtctgcgggtatggctatgcgcttagcgcccggagctaacctacttgatgtgtctaaaaaagtaaaagaggttgtggaagctcagtcgcagtttttccctcaaggtgtaaaagcccttttcccttatgacacaacgccttctgtaaaatcgtccattagctctgtggtaagaacgattgtcgaagcttccatcttagtgttcttggttatgttcctgttcctacaaaatattcgggcaaccttggtgccaacattggctataccggttgttttattaggaacttttggtgtattagccgcattaggtttaactatcaacgtattaacgatgtatgccatggtgctcgcaatcggcttgctggtggatgatgccatcgttgtggttgaaaacgttgaacggatcatgcatgaacaggcgatttcggtaaaagaagcgaccattctctcgatgacgcaaattcaaggggcgttagtggggattggtcttgttttatcagcagtctttgtgccaatggcattttttggtggatcggctgggattatttatcgccagtttgcagcgactattgttgtcgcgatggcattatcagtgcttatcgcattaacatttacacccgcattatgcgcgtccatattgaaaaagccacaacctaaggtgaagaaacgtcgtggattcttctggctgttcaaccgtttctttgatagaggaactaactattacgagaagggggtacgcaatatcttgtaccgtcgaggccgttatatgtttattttcctcattattaccgttggaacagggtggttatttacgcaattacctaaagccttcttaccaaatgaagaccaaggggttgtgatgattgaagtccgtatgccagcaaatagtaccgctgagcgtatggaacaaaccatggcagaatttagggattatttactgaccgaagaaaaacatctggttaaaacagtatttactgttaatggctttaactttgcaggtcgtggtcaaaatgcgggtatggcatttgttaacttggctgattggtcagagcgtaaaggaaaaggagaagatgttttctcattagtggcacgagcacagcaacactttaactctatccgtgatggtatggttattgcgttcccaccacctgctattatggagatggggaatgcgatgggatttgatttctacttacaagataatgcgggtttaggccatactgaattggttaaagctcgtgataaattcctcgaattagcagcacaaagtccagtattaactaatgttcgcccgaacggtaaaaacgatgaacctcaattacgtgttgtgattgataaagagcgtgcaagagcattacaactgcgtttatctgatattaacgatacattatctgccgcatggggatcgatgtatgtaaatgattttattgatgaaggtcgtgttaaacgtgtttatctacaaggggaagcctcagcgcgtatgttgccaaccgatctggataaatggcatgttcgtaatcagcgcggtgaaatgatcccattcaacgcctttgcaacaacacaatggtatatggggccaccgaaattagagcgttttaatgggctatcagcgattgagatcttaggtgaaccagcgccaggttacagtacgggtgacgcgatgctggcaattgcagatattatgaaacaattgccatctgaaatcagcctaagctatagcggtctgtcttatgaagaaattcaaacacaagaccaagcacctgcattatatgtgatgacaattctgtttgttttcttaagcttagcggcactctatgaaagttggtcagtacctttctctgtcgctttagtggtgccatttggtattttaggggctgttatcgcgacactgttacgaggtttatcctcagatgtctatttccaaataggtttgatgaccaccattggcctatcagcgaaaaatgccatcttaattgttgagtttgctaaacatctttatgagaaggatggtaaaccattaatcgatgcggcagcagaagcggcaagaatgagactacgccctatcattatgacctcactcgcctttacttttggggtattacctatggcacttgctgcaggtgcagggcaaggtagtcagcactctgttgcaacaggggtaattggcggtatgctcgcatccactttcttggctattttctttgtaccactgttctatgtctttgtggttaaactattttcacgaaaaaaagcacatgtgagtattgaggaaatagataagtaatagaattatctcgcagtgagatttaagcgtaaaaataacccaaaccatagcaatgactgtggtttgggttttatttttaggttagtttaatcttggtgaggagattttagtttaacttttaatagtcttacggcattggcggtcactaaagctgttgctcctgagtcagccaatacggcaacccaaagtccagtgataccgaataaactggtgactaagaatatcgcttttaaacccaatgctatggtaatgttttcacgtataattttacgtgttgcacgagatagctgaataatttcgggtaagccagttaaacgattatgggttaatgctgcgtcggcagtttctaaggcgacatctgtaccacttcccatcgcaacaccaatggtagccgctttcattgctggtgcatcattaataccatcacccaccatcattgtgttatgtgtttgactgatttccatcactgaggtgactttatcttcagggagcaatcctgcacggaaatccatacccagtttttgtgcaatcgcagccgctgctcttgggttatcaccggttaacatcacggcattgatattcatcgatttcaacactttcattgattcgatagcatcgttgcgcaatgtatcttgcatcgcaatcacaccaatgaactgatcttcttttaataccacgacaacggttttgccttcatcttcaagacgagcgacttgttgttgccattgtgcagataatggtgtggtttctgataattgtgttggggcactgaccagaatatgctgattatttaaataaccttcaatccctttacccgctaaagccttgcgattatcggcttccacaacatcaatttgttgctcttgtgctttattaataatggcttttgcgagagggtgatgagagccaacttctacagaagaagccaacatcagtagctctttctcattaaagcctacatttgctatgacatcagtgacttgaggtttaccctctgttaatgtgcctgttttatctagagcaacggtattgactgtgcccagttgttcaagtgctgcaccacctttaattaaggcacctcgttttgttgctgctgccagtgctgatgtaatggcggctggtgttgaaataaccagagcacaaggacaaccaattaataacagtgttaaaccacggtagaaccaagtttcccaaggttgagcgaataacaaaggtggaataatgatcactaatgcggaaaacagcataatcagtggtgtgtaatagcgactgaaacggtcaacaaaacgttcaatgggcgctttacgctcttccgcttcttcgatcagttgtaaaatacggtcgatggcattttgcccctgttcagagaccactttcatttgcaccgagcgatcaacagataaacagccagcagcgactttttcaccttgtaaacgttcgaccggcaccgattcacccgttaatgcgctttcatcaaaacttgcaaaagcagtaattaattcggcatctgtgggtaagcgcgcacctggtgcaatttcaataatatcgccggggcgcaattgagctacagggactgtctgttttttaccctcttttattactaccgcttcttcaggtacaagagccattaatgcgctgactccgcggcgtgcacgacccgcagcataagactcaagcatttcgccaatcataaacagcaaaattaccattgccgcttcttcggtggcattaataaacagtgccccaatagccgcaacactcatcaaggtttcaatcgcgaatggggtaccactacgaatgagtcgtagtgatttttttacaatagggaataacccgattaatgtcgttgcaataaaggcagcgcgacctgcttgtggatcaataaactcggcaccccaacttatcgccattaaaatcgctaagataatgacgaatgagctctcttttaagaggctttgttttgcaggaggctgagatcccgctgatgagatatcaaatagttcaaaaccggcacttttaacggcactaatcacatcagtacgtaaatcggtatcggcatcgacaaccagtttttcagtggcaaacaagatcttcgcttgtttaacgccgaccactttcagtactgctgtctctatcttttgcgcgcagcttgggcaatccattccttgcactttccaactaaaacgttgctgtgcaattttttcaggctctacattagagacaggggcgttgctgtcacaacagccatgggcatgatcatgttcttcttcacattcgggatcactcttatcgattttgctatgagtgtgtccactttcagtatgtgagtgcatactactattatctgcctgattagagcagcattgagagcttgaacagcaagcatcggtatgtttatggttatcgtgttgatgagcgtgtttagacatacgcctctcctcgttcaacaaagtacagttttatcaattaccgatactttacagcttggagtagagtccagagtcaagataaacagagcgtattgattgtcaaaaagtgcggatttgttaaatcaattaatcccttgtttctattgataaagaaacaagggatcagggttttacagaaaaagggctctaacaataaagaagtgaccaataaagtaacaggcacttaccagtcctttagaggctgaaaaagagaagcggaaacggttgataagccaaatagagtaagcaattactaacaagagtgagcctatcatgatagaaaagttgtagtcgttgctcaggtagaagaatttctctcctgcaacccaaaacatcgcaaaagccgctaataaagtcagtaatacaggaatggcaaatttatccagtttagtccagatgatggctaacacgataattgcggcaacgataacaaaaccaagcaaaggaagataaaaagagatttgtaatggtaaggcaaaactaattaggtagagaatataacttaggaataacaaggctaaagaaggtagtaaatacttaccttcaaacatttttaatacatcagaaagtaatgttgctaataaagcgccgacaataagataactattaatgctatgctcagggacttgccatgcccaaaggagtaatagtagtagtgtaatagggcggaatagccatcgttgccaattagggccacgatacgcggcatcgatataaagccacccagaaaataagacagcgagaaaaggccaactcataatatcttccttattcttatatagagaactcttttattattcataacagaaagcataatttaagaatagcgattaatgaagaaactggcgtattaattaaaattaactacagataagcacaatgtgaatttataacgataataggaatgagtgtaatgaataaagcgggaatgttaggtatcgcggtgctgattatcattatcgctagcgcaacatatcgtttttttgagcaaagaaaacagcgtatcagtgatgataatgcacccgttaaattatatatggtagaagttgttgataagcaacaaataccgaaaaacgatcgacgttcaagagaaaatgatattaatgggccagaaacaacctattactatcaagtgacttttcgtttaacaacggactctcagcaagatattatcttacgtgtggataaaaccactttctcaaatgtagcgctggagatgaaagggcgattatttatgcaaggtagtcgtttcgtgcagtttgaaaccgatgcaccagataatgagagtagtaaaacatcagctcaataagcgtcagagcataagaaactggggagttagcgtgttatccccagtgacttgaatagacgatgattattggtttttatttttttgtttttctagatactctttgcgcaactctttttgtattctcaatagctcaaaaataccaaaaaagaagatcttaaattggagtaagccagaaggttttttatcttcgggttggcctgctttatacatggcaatttgtaagccgtgcataatcaccataaagattaatgcgatatccataaagtactttaaaggtttagggaatggggaaataagatttaaacaaagaaatccccacacaccgatcattaaaaatcgacctaaaaagattaacatagcagctccataacaaattaagcagataaattgcgaatatagagacgataggcgacttggcctgcgattttttctctatgtaatcgccaattttctggtaaagaataaacctgtgcgtttacttcttcttcaatataaatataacaaccttcggctaaccattggttattttctaataattgcagggtgtttgccaacataccttgatgaaaaggaggatctaaaaacaccacatcatatgccgtaccttgtttagctagataatttaacgcactatcttgaataacatgcccattatcagcgccaagcagcgctaaattagcagtaatttgttgcgcgactttacggtcgaactcaatgaatgtcgtttcttttgcatagcgagagagtgcttcaatacctagcccaccactgccggcaaagcaatctaagcaacgagcgtcctgaataacgggcataagccaattaaacagtgtttctttgactctatcggtggtgggacgtaatccttggctatcaagcacaggaagtttccgaccacgccatttacctccgattattctgatttgtcccatcggcgttttttgtggtttcttagccatatttttctgatatatatcgtttaagcgtgaattttggcgtgttttaatgtttcaaggaacaagtttgttgataacttgataacttaccttgatttaagcgcgaataatttaccataaaattcgtataaaagatgcgtttatcctcgatcaaatgatagacttcattattatttttaatatcgtcaatgttatcgcgccatgatttagtgcgaggagtttagtagctaatggcaaaagaaaaaaaaggttttttctcgtggctcggatttggccgtaataaagaagaaaatactgcacaagagaaagaacaacaacgtttagaggccgaacgtgcagagcaggcgcgcttagccgaagaagaagctcaacgtcaagcgcaactagaagctgaacaagtgcgtttagccgaagaagaagcccagcgtcaagcgcaacttgaagctgaacaagcacgccaagaagcgcaaagagcagaggcagaacgattagctgctgaacgtgcagagcaggcgcgtttagccgaagaagaagcgcaacgtcaagcgcaacttgaagctgaacaagcacgccaagaagcgcaaagagcagaagctgaacgattagctgctgaacgtgcggagcaggcacgtttagccgaagaagaagcccaacgtcaagcgcagcaagaagctgaacaagcacgccaagaagcgcaaagagcagaggcagaacgattagctgctgaacgtgcagagcaggcgcgtttagctgaagaagaagcccagcgtcaagcgcaacttgaagctgaacaagcacgccaagaagcgcaaagagcagaagctgaaaaattagctgctgaacgtgcagagcaagcgcgtttagccgaagaagaagctcaacgtcaagcgcaacttgaagctgaacaagcacgccaagaagcgcaaagagcagaggcagaacgattagctgctgaacgtgcagagcagactcgtttagccgaagaagaagcccaacgtcaagcgcaacttgaagctgaacaagcacgccaagaagctgaagctgaagaaaaagcgcgtattgcacaagcacaagccgaagcggaagatattgtcgcgttacgcgaagaggtattagtcgataaacccgtagagcaagagagaccgaaaaaagaaggctttttctctcgcttgaaaaagggattattaaaaacacgacaaaatttaggctccggttttatggggctattccgcggtaagaaaattgatgacgagcttttcgaagagttagaagagcagttgttaattgccgatgtgggaatggataccactagcaagatcattaacagtttgactcagcatgctagtcgtaaagatctcaaagatgctgaatctctttatggtaagttgcgtgaagagatgggcgatattttaaataaagtggataaaccattaaatattgaaggtaaaaaaccttttgtcattttaatggtcggagttaatggggtcggtaaaacgaccactatcggtaagttagcccgccaataccaagctgaaggtaaatcggtgatgttagctgcgggagataccttccgtgcagcggcggttgagcaattacaagtttggggtgagcgtaatcatatccctgttattgctcagcatacgggggctgatccagcatcggttatttttgatgctattcaatcggcgcaagcaaaaggtgtcgatgttctgattgcggataccgcgggacgattgcaaaataaatctcatttaatggaagagctgaaaaaaatcgtccgtgtaatgaaaaaattagacgaggaagcaccacatgaagtgatgctgacactcgatgccagtacagggcaaaatgctgttagccaagcaaaattgtttaatgaaacggttgggctgacaggattaaccttgacgaaactggatggtactgcaaaagggggcgttatcttctctatcgctgatcagtttggtattcctattcgctatatcggcgtcggtgaaggtattgaagatttacgtccgtttaaggccgacgattttattgaggctctgtttgcccgcgaggagtagttgtaatgatccgcttcgaacacgtcagcaaggcttatttaggtggaagacaagcattacagggggttgattttcatcttcgccctggtgagatggcttttttaaccggacattctggtgctggtaaaagtacattgcttaaattaatttgtggcatagaacgtccaagtgatggcgctatttggtttgctggtcatgatatcagtaggctaaaaaatagtgagatcccttttttgcgtcgtcaaatagggatgatcttccaagatcaccatttgctgatggacagaacggtttatgacaatgtctctctacctttgattattgcaggcgcaagtgaagaggatattcgacgccgagtttcagccgccttggataaagtcggactacttgataaagcgaaaaattaccctatccagctttcagggggggaacagcaacgagtgggaatagctcgtgctgttgtgaataaacccacggtgttattggctgatgagccaacagggaatcttgatggtgaactttcagaaggcattatgcgtctgtttgaagagtttaatcgcgtgggggttaccgtgttaatggcaacgcatgatatgacacttgtagagcgcaggaattaccgtattctaaccttaggtcaagggcgtatggtgggaggacaaaatggctaaaggaaaacactcccgtaaggcaatgccaacaccaaaagcgaaaacaaaagcattacgtggtggacgccgtgagcagtggcgttatgcatggcgtaataccatggccgactttttacgccaacccctctcttctttcttaacggtgatggtagtagcgatttcattaacactacctagtatctgttacattgtctggaaaaatgtatcaacagccgcagagcagtggtatcccgctccgcaactgacggtctatcttgataaatctctagatgacagcttagcgcaggcaacgataaaaaatatcgaggcattagataaagtcgaagaggttaattatctttctcgtcaagattcattagtggagtttcgctcatggtctggatttagtagcgcattagatatgctagaagaaaatccattacccgctgtcgcgattgtgactcctgttatggatcctaatgacgagcaattaatggttaatttgcgtgatgcagtggcaaatattgccggtgttgacgaagtgagaatggacgatagctggtttactcggttatctactttaacctcattagttggacaaatcgcaatggtgatcggtagcttaatgattgtggcactgctattggttattggtaatagtgttcgtcttaatattttcagtcgtcgtgataccattaatgtgatgaaattaattggtgctactgatggctttatcatgcgtccctttttaaattggggtttagtactcggctttatcggggctatttttgcgattattttctctgcattattggtatggaagttatctgatgtcgttacgcaagcggcgaccgtatttggaacaactttctcaatatctggattaggttttgatgaatcggttattttgatcctcgtttcgatgaccattggctggtttgctgcttggttgaccaccatgcaacatttacgtcaattcacaccagaatagccatattagtccctttttccctttttattatggcgggttgcattattatggcaaccttgccattttatcaaacccctatctttggcataataatgttctacacttaacctagatgaattgagtactatttttaatagatgaatttgcggtttgcttggtaaagtacaaagatatgtaaacatagatgcgatatgaacctttagtctttatgctggtcaataatgttgtaaaaacataatatctaccaccaacgatgacctgttaagtactattagaaggttcttcctgctcaccatacagtattaatattaattatctatttgattttcatgaggatttgaatgacaaaagaaatgcaatccttagcattggttccgcaaggcagcattgaagcgtatatccgtgcagccaattcctatccgatgttaacggcagaggaagaaaaggaactggctgaacggctgcattacgagggcgatttggaagcagcgaaaacgctgatcctttctcatttacgcttcgttattcatgttgctcgcagttattcaggatatggtttacctcaggcggatcttatccaagaaggtaatattggtttgatgaaagcggtgcgtcgctttaaccctgaagttggggttagactggtttctttcgccgtgcattggatcaaagccgaaattcatgaatatgtgttacgtaattggcgtatcgtgaaagtcgcgacaacgaaatcacagcgtaaactgttctttaatttaagaaaaaacaaaaaacgcttagggtggtttaaccaagatgaagtcgagctagttgcgaaagagcttggggtttctgagagcgatgtgcgtgaaatggaatctcgcatgtcggcacaagatatggcatttgacatgagtgctgatgatagtgatgactcacatcctgtagctccggtgctattcttagaagataaatcttctgactttgctgatggtattgaagaagataactgggataaccatgcagctgaccgactgactttagcgataaaaacactggatgaacgtagccaagacattatccgcgctcgctggttagaagatgataataaatcaactttacaggagcttgcagataaatatggtgtttctgctgagcgagttcgccagttagaaaaaaatgcgatgaaaaaattgcgtttagcgattgaagattaatcacattttaaagccaatccaacctctctgattgtagagtatgatataaaagcgatattgatatatcgctttttttatacgcggagaacatgacgtgaaagagataaaaatagttatcgccccagatccttttaaagagagcttaagtgccaaagaggtggcagaggcgattaaacaaggcttttcacgttatttacctgatgctgattattgttgtattcctatggccgacggcggtgaaggtacagtaacgtcattagttgatgctacccatggtcgttttatcacaacgccagtttgtgatccattaggtaaacaggtaacagccacttggggagtgttaggcgataatactactgccgtgattgaaatggcacaggcatcaggtcttcatcttatcccttcatctcaacgcaatcccaatttaacgacgagttatggtaccggcgagttaatttgtgccgcactagatttgggggttaaaaagatcattttaggcttaggaggaagtgccacaaatgacggcggtgcaggtatgatgcaagcgctcggtcttggtcttaaagataagtctggaacatctttgccttttggtggacatgcattaagtcaacttcattctatagatatcaatcaactacatccaaaacttgcctctgttgatatagagatcgcctgtgatgtaactaatccattatgtggcgaattgggggcttcaaaagtctttggcccgcaaaaaggggcgacagaacaagatattgcgcaactggatagcgcactacaccattttggtacttatcttgagaaaatgacacaacgcactcttatcaatattgcaggaagtggtgcagcaggaggattggctctgcctttgctggcatttacgcaagcaacactttcatcaggtattgatttggttgctaacgctgttgaattagaaaaacagttaatcgatgcagatttggtcataactggcgaagggcgaatggacagccaatcagcgcaaggtaaaaccccgataggtgttgctaaattagctaaaaaataccatcgcccagtgattgcgttagttggtggttatttaccggattatgatgtggttcatcagcagggtattgatgcggttttctctatcatgcctggtgttgccactttacaacaagcctttgataatgctaagcaaaacttacaggaaaccgcttataatatagcgaggctttatgctttatcattgcataaataatcataagtatcagcctgtaatgaagtagtaaaatgatgatgcgctaaaaaagcctgtgctacaggatcgttgatttgccctgttttcaataaagcttgccaatgtgtaatggttggatttttttcaaggcattgtgttagtaagtaatgcccaacaccacgacgacgagtcacttctcttaccataaaatcactgataagcgctgtttttgcttggtattttatacgacaagccgctagtaatcgcccgttaaaacgggcgacaaaaagagcatgctctgtggtgattggtgcagtgagtgccatttggtactcactatcttgccaaattttccctaaatctattttatcttgtgctgaaagctgcggcagtttttcaatggttagtttcatcaaatgtcctgttagtcgatggtttgtcgttgctgttttaatgtggaaagtagcgttttgatggcaaaacacaatgccaaacttgttaagatcacacaagaataaaagacatattgataatgattatcggtgacaaaatagcttgcgaccataggccctgcagccataccacagtagcggataaaattataaatacccattgccgttgctcttactgaactaaagtggctggttattaaggtcgtgtgtgtaggcatagttaatcctaaagagagaccatataacaccgttaatattaacattattggtaatgagatttgccaaaatagggcaaataacgacaacatggcaaggtttatacatgaagttatgatcacaccatattcagcgctaaacaaatgacaaaccttacggtaaaggtaactgcctaacaccagtgcaatggacataggaacataaagcccaccaatttcactgctatttaagtgataaaggtgaaaagcaattaaaggtaaaaatactaataggcagaagtagttataaaacaccataaaacttatcacaaaaacagatttaccctctggggcggcgagcacttgtcgcatagcagataagcttttaacggactgtttttgttctgggcgagtttcaggtaaataaaatagatgggcaatcagcaaaacaagtcccaccatacttaagaaaacaaaaatactttggtagtgataatgttgtgctaaatagccgcctaataaaggaccactcgctggtgctaatgctagcaacatttggtaacttcccattgctttagcacgctcattcccttgatagagatcgcctaaaatagttgctgcgacaacagggatggcagcgatacctatggcttggatcactcgtccaaaaattaataggttaatagaattagcccatatacaaataagtgcgccgataattgaaatcgttaacccactgagcaaaataggttttctgccccatttgtcaatcaatgaaccataacataactgcataacagccatagcaaaagtgaaagctgataccgtaaggttaaccagtgataatgtggtattaaattgctgctggatcaatggcagcacaggagtataaatattttgtgctagagagcctaataaagcgctaaagcaaacaaggtaaaacagactacggattgataatttcattatattgcctcttagttttgtttccatggaaacaaaatagataatagcgatattttgattgatgtaaatagttttggtattattttttaaaatattttttccaaggaaacaaaatgacaaaacagcaagtaaccacacaggaattgcttaatggtttaagtgaattgttgcacttaaaagaagcgaataatgatgaaggtcataagaaagtattagcagagaaggggttagaaaattattcactcacagagcttcatgtgatccattgtattggtgaagagagtatgcgtaacctcacaacgatcagtgattatatggcaatgacacgtggggccgtctcaaaaatttgtcgtcgcttacagagtaaaggcgctattgagaaaataaaattagcggataaccaaaaagagatattttttattttaactactgaaggggaaaagctgtttcacactcatgaattgttacatcaacaatctcaggcaaaatggataaccttatttgaacagtatgatcaaaatgaaaggcgggcaattaaacgctttttagctgatgttgcaaatcgttttcgccacaagaaaaaagcataaagaaaacccccatatggttaaatataggggcgataaagtttattttttatcttcggcaatgcggttacgaatattgtcagcacgctcttttgatggtgggtgagaatcaaacatgcttgaatcactaccacctaatttagctaatttttcaaagccagtcactaagcctgaagtattgacaccgcgttttttcagcagatcgtaagagaagttatcagcttgtgtttcttggtgttgagagaactgggcattaaccagtttttcacccatttctgctaactgggaactacttaattgtgctgctactccccccgctgaagaggctgcggtacgtgccgcaacggtggcatgtgctacttggattgctttacgtgtatggcctaatgctacatgtcccatttcatgacccaatacaccttccacttcgttgtcagtcatgatgtccattaaaccgctataaacacgcacacagccgtttgccatcgcccatgcattgacatctttagtgagataaactttatagtttactggagtaccattaacttcattacctaacgctttcgcgatattatttaagcgtttagtgtagttactatttgcaggtgcaattttgtttttagcatccatttctttacatgcatcattagttagcgctttgacatcgtcatcacttaatgttgccgcttggaaaagttgtgtacctgattgcgctaacatagaagtatcaagatttttacagccagagagtaatgccgcggataccatcactgtcgcaagtagttttattttcattatcaattaagtccttttctgcttagcagtttaatattattagttgcacattaaatgcgagcaaaagaatagcagtgcttatctagtggtgcaatatgcggatattccaattatattattctactgctataaaaaattatttttattattttaaacgcgtatttttctattttttaaacttattatataaaatattaaaatccttaataagtgtacttttattaatgtaactaatcatggtttttaaaatggatttaaaggtatttattgtaaaatttttattaaattttaatatgttgtaaattttttatcatctctcttttagcaaagattaatcgcaatggatagcatcaaaataatctactttatacattttaagtgttaagtatattgatgttatgtgtgtattctcatcgatgaaaaaataatagcaatgctaaaaacattgctattaagattaaactgaaaatgaatcacagtgagaataaattaagagactaatcgttcacttaacaacatggtaggacgttcaatccgtttttgggtttgtcgatcaaaaaaatgtagattttctggataaatagcaacacctattctattacccacattaacaccatgatcgtttgcggctcgaataacaatagattgttggtcacaagtggtggcgtaaattaaaacatcagcccctaaagcttcaataaaatcgacattagcatgaaacagtggattttgttgatttatgagcaaatgttcaggacgtaatcctagttggatctcaccattaggtaatgagtgggcagaaatagcaagatgaccatccgcaatttcaataataccgcgattgatatgagtggttaaaatattcatcgccggtgatcccataaatgttgccacaaatacagaagctgggctttcataaatctctaagggggagccaacttgttctatatgaccttggtttagtactactaatttatccgccaaggtcatggcttccacttgatcatgagtgacataaacagaagtagtggctaatttttgctgcagctttttgatttcaagacgcatttgtacgcgtagtttggcatcaaggttagagagcggttcatcaaataagaagactttgggatcacggacaatcgctctgcccatggcaacgcgttggcgttgtccaccagaaagctctttaggttttctatccagtaaatggcttatttctagcatatgagcagcgcgatcgactcgggctatgatttcagctttggggatttttcgattacgcaaaccatacgccatattgtcatagacagacatatgtgggtagagggcataattttgaaaaaccatcgcaatatctcgctcactaggctcatgttcatttacgcgtcgattatcaatcagtaaatcgccatctgtgatggtttctaatcccgctatcatgcgcagtagtgttgattttccacaaccactaggccctactaaaaccaccatttcgccttgctcaatagagagattgagcgtggaaattgcttgataaccattaggataacgtttttctaaattagtcagtgttacggtagtcatattatttctccgtatcaacaaagcctttaacaaaggctctttgcatcaaaatgacgataaagacaggtggcaacattgcaattaaagtggttgccataattttgttccactcaatcacgccatcagatacggccaccatctgtttgatgcccatgacaatggtgtagtactgagtatctgtggtgataagcattggccaaagatattgattccagccatagataaaggtgataacaaaaagtgcggcaatattggtacgggataaaggcaataaaatagtaaagaaaaattttattggccctgcaccatcaattttggccgcttcaatcagctctggggtgatagtaagaaaaaattggcgaaacaaaaatgtagccgttgcactcgcaatcagtggaatggtcagtcctgcataggagttcaacatattaagatttgtcactacctcaaaggtcggcatgatccgcacttcgacggggagcatcaaggtaaagaagattgtccaaaaagccagcattctgccaggaaaacgaaagaacaccacggcgtaagcggaggcaatagagataaccaatttaccaatagtgatcactagcgccataactaaagagttcaatagcataccattaatggtaattgcactattttgagtcgttcccgctgatgaaaagagcgttttaaaaacctcgataccctcctgaccaaaccaaagaggcgagcctgtggcaaattcggtattttggtgggtagtcgcaacaacagcgatccataccggaaatgctacagaaagaatgccaacaatcagaataagatggcaaaaagcgtggaagagaggtctacgttcaaccattagtaagccacctttttctcaacataacgaaattgaataatggtcaatatggcaacaatcaacattaaaataaccgattgtgccgctgatgagcctaaatctaatccaacaaatccatcgttatacactttataaactaatgttgaggtgctattaccggggccaccttgggtcatggcatgaatgatgggaaaggtgtcaaaaaaggcgtaggcaaaattcaccaccaataagaaaaaagttgtcggcgaaattaatggcaaactaatggtaataaaacgtttaattggaccactgccatcaatggctgctgcttctagcaacgatttaggcacagattgtaacgcggcaagaaaaaacagaaagttatagcttatctgtttccatgtggcggttaaaatcaccatccacattgcatgagatgtatttaagaccggatcccaattgataccgattttgtttaatactcggcttaatacaccaatggtaggatcgagcataaacaaccagagaaaacctgcgataacaggagcaatagcataaggagcgataagtattgtgcggtaaaacaatttaccccgtaatatttgctcagcaatacccgctaaaataaccgcagataacattgaaagtaatacaacactggtactaaaaataagcgtggtgattaagctgtcaaaataataattatcattaaataagcgctgaaaattttctaaaccaacaaattcactactaaggccaaaagcatcttctaactgaaaagattgcaacaatgcttgtccagccggccaaataaagaaaactaaagtaatggctaattgagggaagatcagcgcgataggtaaccatttttgtttaaagtaaacggattgggaagccatactgtatccagagatctgacaaaataacaggcgaacacttattgatgttcgccgaataccaaataccttactgagtgcgttcaaatcggcgtagttgttcatttccccgtttaaccgcattatccaaggcggcttgagcgctctgtttgcctgaccacactttttctaattcttcatcgacgatttctcgcgtttgtaaaaagttaccaaagcgcaagccttttgagtttgctgtagagtcagaggtggtcatttgtaaaatagccgtatcagcaccaggattttgctgatagaacccctgttgttgtgttaatgcataagctgctttcgtcacaggtaaataaccggttgcttgatgccaatctgcttgtacttcagggctagaaagataggtaaagaatttagcgacaccgttatattcagcatcagggcgacctgccattacccataatgaggcacctccgataatgctattagcaggtttatcaactaaagtatcgtcataaggcaattggctaacaccaatatcaatgcctttcatattctctttaatacccgcaaagcctgcagatgactccatcaccatggcgcattcttgagtataaaatagcggcatagcatcagattggcggccaccatatttaaaaataccggatttagaccaatccgccatgcgttggatatgagtaacaaacggtgcctgattaaataaaaatgaggtatcagtcccatcaaagccgttatttttggtggcgataggtaagttattacgagcgccaaaattctctatttgggtccatgattgccaagtggtggtaaaaccacatttcacgccagcatcaagtagtttctgagagacagcccccatctctttccatgttttaggaggttgctctatgcctgcttgtttaaatagtgctttgttgtaataaagcacaggcgttgagctattaaaaggtagagatatcatcttaccatcgctggtggtgtaataagcggtaactgtcgagaggtagctattaggatcaaatggctcgttggttttttccattaattggtaaacaggaaaaacggcttttttagctcccatcatacttgctgttcccacctcaaacacttgaacaatcgcaggttggtttttggctcgaaatgcagcaacagcgctggtcatcgtttctggataagtccctttatagacaggtttgatcacatattctgattggctggcattaaagtctgaggcaatttgattgactttttgacctaaggcgccccccatagcatgccaccactctatttcggtttttgcgtaggttggtgaagtaaataatgctattgctatggcaagcgtactgaaggatttaatcgacatgcaaaatttcctttttatttaaatacgaaaggcgcaatctaatttaagaaataccctaagcgttctttatgacaaatgggtgacaattaaatgaagatatgttgatggtgtgactgtcaaattgctgtcataaatggttgtcatgatggcgatatcaacgaataaggagagaaagatgaaaatagccgctcatagaggattttctggaaaggcacctgaaaacacattagctgcatttaaaatggcaattgattttgggtgtgaatggattgaaaccgatgtgcaattaacggcagatcatgtacctgtactgatccatgacaagacggttaatcgttgcacgaatggacaaggtgcggtgcgctttcatagtttggatgatttacaccgtcttgatgcaggcagttggtttagttcactttatcaaggggaaaaaattcccacactaagacaaggtttgcagttgataaagcgctcaggcactaagctcaatatcgaacttaaaacatggcctgatgatgatgtagagcgcttatgtttagcggtatctgaaatgataaaaagcgcagatatccctaacgaacaaatcctgttttcctctttcgatactcatgcattaatggtgatgaaacgttatctgcccgccattcgtcgaggacagctatgggatgatattcctgataatgcactagaaactttacaagctatagaggggtttagcgtgcattgtaattatcaatatttaacgcagcaacaagcggctatgttgaaacaagcaggctatgaaatttattgctatacccccaatgatcctaaagaagtgaaagattttgaagcatggggagtcgatatgttgatcactgatgtcccagatatttatcaacagaattaatgtgctttttataaggtatctgagtgaatgacacagatgccttataatgcttatttttatcactaatctgtcaatatatggctagtaggataggccttattataattatgaggatttaaccgtgcaaataatcccatagttaatatcactaagacagcatgaaaagcccaagcataggtaaaactaccatcatcttgttgtagccatactgcgatcagtggcccaaaagaggcaataataaatccgccaccttgcatcaaggctgatagtgctcctgcgtgtaatggatgaggaacatgatctaatgcggcaatcatcatcattgagaaacaaccacccaacccacagcctaaaaagatactccatagataaggggcgctcattggcattgtcatcagcgctaaaaatccaataagttggcttgtcagtgttaaaagtagccaaaaacggcgatcatgatttttggcagcaagaaatggaataattaatgctgctgatgcttgaaagagtgacaaaatagcaactaatgagccactttgtgcacttggcatacctaatgattgatagaagggagctaaccatgccaccatcgaagcgtaaccggcattaacaaagccaaatccaacaattaataaggctgttcttggtcgccaaatcaatgtattaagtggcagtttattggtttcggaaatattctttttaattgatagcgtaatagcaactaatgcgacgctcgcgggtaacgcaaaccaagcaagagcctgttgccaattgccatcagatgccgtaagaacaggggataactgagcacctaatgcacctcctcccattagcatggctgagtagagacccatcataatgggagttttctgtccaaaccacgctttgatgatgccagggaaaaccgcttggatataagcgacacttaaaccacaaaatagagcagtaataagtaactgatcaccatcagaaacataggcacgagaaaacgatgctaataataagataagcatcgcaacttgtagccctctacgagcttgaatataaggttgtaaaaagggcacaaccaaagcaccgactcccattaaaatcatgggtaataacgtgagtaatgagacttggctatagctcatgcctgttgaagcaataatattgtcaataacagggccaggcccggttaaaaaagggcgtaaatttattcctactaaaatgatagtaaggacaatctgccacatattttttcgtggtaaggctgtcatagtaattccctgataaacatcaaatttgtctattgtatagacaaagtttgtctaaaaaaatgctaatagtaaagataaagtatcattgttttcagttaaggttagcattattaacagaatatagaactctaatctgaagatgatattttcccgaatttgctctatcagttgtttcctaagtaaatttatctaaatgatatttggtttcttttatattaatattagcaggaaggtgtaaactggtttattattttataccgaaaaatataaataactaaggtaagttaatgttgagtatggaaaaaattaagcaaccctattggccagcattaaaattgatattaagttcacttattgtttttagtttctatttgaaacaaagccatacccctgacttttcattactgattaatatatttgatttaacattaattcctatgtttgtttttattatcgggtttattactaaaaatgggacatggaaaagttggcgtgataatttattggctgccttagtgatttatgcgactttccaaactattgatatgatccctctttattattcagggcaatttgaccttaatacttaccttctttttcctcaaaatggtgtgtggttttttcttgctacacctatttggcaagcttttttcctattgttaccttcatacatcagacatcataaaccaatattattctctcttctgcttgtcagtattttgctatcgttgttaactaaaggctatgaaactaaactatccactttcttggctataatacaatattttccattttttattatcgcttatttagtagaccaacaaactattgctaaattgagaagtcaatcttctgtggttattgctttaataagtttattatcaatatttatactttattatcaatctaatatcaattatattattctaacaaaattagaagggagtctattttttgcaaaattaattatatatattatctctttattgataagttttattttaagcgcagggattatttaccttgcaccaaccactcaaaaatacgcttctcttgccaataatgcgttaggtgtttatttaattcatccaattatttgttttatccttttacaaggcataatcttttttcagttatctcttacattaccgatggtttttgcactcatcattatcacgattagcctagcactattattggcatcaattaagcttattcattggtttattagcccaacttttaatatccgatagcttagtcaacatgagtggagaagaatgccattaatttttctccactaagaataaaatcgtatgttcactattaatttgttttatttatataaatcaattattttatgtctttaatgacatttaataaattaataatgcgatatttagtctatttaggacttgccggtgtattgctcagttttcctatctcatttgtagtaaatatctttcttcttgatgaaggatataaaacgtgtgataaaatttcgtggctatcacccactacatatgtaaaagaattatcgttttgcaataacaaaaaagcccttaacaaataatgaaaagggctttttaattcaatgtattatacgacttctattaattcatgccgtattttttcagtttcttacgcagtgtgccacggttaatgcccatcatttgcgcagcacgtgtttggttaccacgggtgtattgcatcaccatgtccaacaatggctgttcaacttcagccaataccagctcatataagtcattaacatcttgaccgtttaattgagcaaaatagttcttcagtgcttgtttaactgagtcacgtaaaggtttttgggttacctgatcttgtgaatttacagtggcaacggttagtacgtctgaatttacgcgttgttcgaacatagttctgtcagctcttttatttatttacgcaaaaaattttcgaaatatgcttccaacgcctccagctgttcgctggcatcctctatggcgttgaaggagcgccgaaactggtcatcaggggcatgttccttgagataccaagagacatgcttgcgtgcaatgcgagttcctttgccttgaccgtaaaagtcgtgcaattcacgcacatgcttttgcattatttgttgcacctttgcaatcggcagaggaggcaacagttcacctgtgtccagatagtgctggatttcccgaaagatccagggtcttccctgagcagcgcgaccgatcattaaagcatcggctccagtgtagtcaagcactgctctggcttttagcgggtcagttatgtctccattcgcaataatgggaatagagacactctgcttaactgtccgaatactgtcgtattcagcttcacctttgaacaaacactcgcgcgtacgtccatgaatggtgagagccgcaataccacaatcttcagccaatttggcaatctctacacagtttcgttcatcaggtgaccatcctgtacggatcttgagtgtaacaggtacatcaaccgcattgaccaccgcagaaaggatctctgcgactaaatccggataacgcagcaatgccgagcctgctaactttttattcaccttttttgccggacaacccatattaatgtcgataatctgagcgccaccttctacgtttattttcgcagctgtagccatatcaacagggtcacttcccgcaatttgtacggagcggatccccaattcatcgctatgtaccatccgtaaccgagacttgtctgtcttccaaacctgaggattagaagaaagcatttcagaaactgtcatccccgcacccatgtcatagcaaagtgaccgaaaaggtcggtctgtaacgccagccattggagctgcaatgaggcaattttttaactgatactgtccgattcgcatagatgaaaagagggccaaactgtgactgcaagggcgcgtatattacgcattttttaccagatatgaaaggacaaagtttaaccaaatcgcgaaaaaaagttacttttttatacttgattttttataaatagattatttagtcaataaaaacaaaatgttactgtttttctaaaattttaaatttaaatatagagaagtaacaaactcaagcaacaaggtgatatttatcaggcaaaattgtgattaatgcctgataaataatcattaagtgaaactttaactgtttaatattatcgcaaattgtttaatatttaacctatgttattttttcactccggtaatacgacaccactcttctttttcagccacaggatctaaagtaaattgttcttgataagcttgtgcaacaccgtcagcttgtgtggcaagaacaccggaaagacctaaatgccccccttgacgtggcagtgtgctgataataggagctaattcacgtaatggaccagctaagatatttgctaccactacatcggcactgagattgtctggttggtctttagcaaggtatagcgtcagtgcatcagcgacaccgttacgttgcgcattgtcgcgacttgcttggatagcttgtgggtcgatatcgatacctatcgctttcgcagcccccagttttaatgctgcaatggctaaaatacctgagccacaaccaaagtcgataacggttttacctgcgagatctaaaccatcgagccattgtagacataaagaggtggttgggtgagtaccagtaccaaatgccagacctggatcgagcatgacatttacagcgttaggatcaggcacttcacgccagcttgggcaaatccataaacgttcgccaaagcgcatagggtggaagttatccatccattcgcgctcccaatctttatcttctaattgttcgattttatgtacaaatcctttacccagcaccgccgtgttttctaacatagccacgatgatactcatatcggtttctgcatcatataagccaataacatcggtatcaccccagaggcgagtttctcccggtaatggctcaaaaataggggtatcgtggctatcttgaaaggttactgataccgcgccactttcaaccaactcatcaccaatggcttcggcgttttctgaggtggcatttagtcttaattgtatccaaggcataattaatctcttttaaaaacaagttcactgtaatggagcagattgaggcaaggtttgttctccaaacctatttgcgacaagaaaagccactaagctcaataacagcgcaggaataataggatgaaatccagcaatctggatattaaatgttgccagtgtagcatagagtgtggcaccggttatcatgcccgcaatcgcgccataacggtttgctttgttccagtaaaggccaagtactagaggccataagaaaaccgcttgtagtccaccaaaggcaagtaaattgagccaaattatcattgatggcgggttccatgcagcaaatagcaataagatccctaaaatcaaagtagataggctagataaacgcgcaatgcgtttttcattgtttatggcatgaggcgcgagattgagatagagatctttgaccaatgtcgctgatgattgtagcagttgtgcgttaatcgttgacatgatggctgccatcggtgccgctaaaaatataccggcagcaaaaggtggtaatacatcaaccattaaggttggaataacttgatctggcacggtgagatcaggaatgattgcccgacctaatgcgcccgcaaagtgcataccaaacattaataacgccatcacgatggtgccgatgatgatccctctgtgcatggctttgctgtctttataagagatacagcgcactgcagtatggggaaggccgataaccccaaaacagaccaatacccaaaatgacgccataaaggggccagttaaaatgccgtcagcaccatgaggagaggtaagggcaggatcgatagcatttagtttttgtattgcaatatctaaaccacccgccttgtagataatggcaaaaagcaaaataaaggtgcccaataacatcacaaggccttgtaaggcatcatttaatacactggctctaaatccgccaatcgctgtatataatgcgattgagataccaaatatcagcaaaccaaattcatagggaatacccgccgcggtttctaataagcgagcaccaccaataaattgtacggtcatggcgccgacaaaagctaccagtagacttaagctggcaaaccagactaaaaagcgactttggtagcgagcatagagcatatcatttagggtgacggcgttataacgacgcgccaaaatagcaaattttttacctagtaccccgagggagagccaaatagcggggagctggatcatcgaaagaagtacccaaccaatgccgtatttgtaagccgctcctggtccaccaataaaagagctagcactgacataggttgccgtgatggtcattgcaaggacaaatccacccatagagcggttaccaagaaaatactcgttaagaaattgccctttttcacgtttacgatatgcgtatgcggataataggaagaccaataagagatagccaaccagtggcacgataacctcagtttgcattgtcatgctcatctcctaacggcatatctttgaaaaaatagcgtaccatcagataacacagtaaaaaaaatagcacaggtaaaaataggcatgaaagctcaaaccaaaccggtaggccggttagtcccacactattatcgggtaaataggcagtaagtaaccaacccaataagtagataaaagtaagcactaaggccaagagggcttctttgtgggcctgaacaaaacgcttgtccatctgttctcccaatctttataggattaaaacgaatgggaaggattgtacgggaaagtgagaggtgattcagtgaaaattgatcataaacttattggtggcatcaaatgatgaggaattgattggcggttgagtgtgctgcaggaacttatttggttatttaatagactatttagtcgaataaaaaaggcatagtcgataaactatgccttttactgataagctaaaaagattaattttcagttaaacctaggcgtttttctaggtagtgaatattagtaccacctttttggaattgctcatcattcataatgaattggtgtagctcaatattggttttaatgccgtcaataataagttctgccaacgcatttttcatacgagaaatcgcaatttcacgtgtttcaccgtaagtgatcaatttaccaatcattgaatcatagtgtggtggaacggtgtaacctgcgtaaatatgtgattcccaacgtacaccaaatccgcctggtgagtggaaacgagtgatggttcccgggcttggcaagaaggtttttggatcttctgcgttgatacggcactcaatagcatgtccatgaacgtgaatttgatcttgcgtgaccgataatggtaagcctgatgcaatacgcagttgctctttgataaggtcaacaccggtgatcatctcagtaacagggtgctcaacctgaatacgggtattcatttcgataaagtagaattcgccattttcatagaggaattcaaacgtacccgcaccgcggtagccaatttcaatacaggcatttgcacagcgttcaccgatatttttacggatctcaggggtaatacccggtgctggtgcttcttcaaccactttttggtggcgacgttgcattgagcagtcacgttcagctaaatagatagcattaccttgtccatcggccatcacctgaatttcgacgtggcgtggattttcaaggtatttttccatatagaccatatcgttgctaaatgccgctttggcttccgcacgggtcatggagattgcttgcgctaagtctttttctgagcgaacaacacgcataccgcgaccaccgccaccacctgatgctttgatgataacagggtaaccaatgcgtttggcgatttcgatatttttggcggtatcgttacctaatgggccatctgagcctggtacacaaggaacaccggcttttttcatcgcttcaatagccgaaactttatcacccattaggcgaatggtttccgctttagggccaataaaaataaagcctgagcgttcaacttgttcggcaaaatcggcattttcagacaggaagccatatcctgggtgaatggcttgcgcgccacttatctctgccgcggcaataattgccggaatatttaagtaactttttgctgaagcagcgggaccaatacagatagtctcgtctgccagcagaacgtgttttaaatcacggtctgccgtggagtgaacggcgactgctttgatcccaagttccttacaagctcttaggatacgcagtgcaatttcaccacggttggcaatgaggattttttctagcatgggcctgcctcgttattcgatgacaaagagtggatcgtcaaactcaatagtatcgccatcttggcaaaggatagatttaacaacgcccgctttatcagattcgatttggttcatcattttcattgcttcaacgatacacagtgtatcgccaacattgacttgctgacccacttcaacaaagacttttgcttctgggcttggtgaacgatagaaggtacctaccattggtgagcgaacaacatggccgctaatttcttgcgttgctgtagccgctggtgtttctggtgctacaggtgccacagcagctgctaatgcaggttgaggtgctgctggtgccgcaaaatattgctgaggagccatttgaccctgaacgccagagttgcgactgatgcgtactgactcttcaccttcagaaatttccagttcagaaatgccagactcttcgactagctcgatcagttttttaattttacgaatatccatgagttgattccgtactcttttgatgttttttattaagacaagcggttgaccgctgcctgtaaagcaaatcgatacccttcagcacctaatccacagattacgccagttgcgatatcagaaagataagagtggtgacggaaaggttcccgactgtagacattggataggtgaatttcaataaatggaatattcacccctaataatgcatcacgcagtgcaacactggtgtgcgtaaatgctgcagggttgataagaatataatcaacatttccccgcgccgcatgaattttatttattagctcatgttcagcatttgattgaaaatgagtcagtttcacatttaatgcttgagcatccgctgacaaactttgaacaatatcattcagagttaggtgtccgtaagtttccggctctctagtgccaagcaggtttaagttcggaccattcaggagcaaaatatgaaaattttccgacattatgcttctatctccgtcaattcgtcaacgaaatgacaaaataacctgtgcttttcgttttgtcatcttttattgtatcgaatgttacgatacaaatcacaaagtccgacattatagacatttcacagaagataacagcaaaatactggtctaatcagggaaagatgggattattttgatgaaaagttaaaagtttttacaagattgtaaaaccaagaaagtaaaataaacagaagtttaaaaaataatcataacatgacgttatttattgatgtgacaggaaatctacgcttctttgagctagatcgataatatatgttataaatgtgatccagatcacattactaaccaggcttaatattaaaaacgcaataatctggcattaaattaatctgtttaatgccagaaattagctcaaaatcatgataaataattacaacttaactaaggttctacctgttacttgattatccattatcatctgagcatagcgtggcacctcatcgagtgtaatttcagttactgtttgctgataaaatgtatcaggcaatagctgtagtaaacgttgccatacttgagcgcgtttttctgcaggataataaacggaatcgataccttgcagacgaacattgcgtaaaataaatggcatgactgtagtaggtaacgtatatcctcctgctaatccacaggcggcaacggtgccattgtaatgtgtttgtgacaagatattggcaaggatttgtccacctacggtatcaatagcgcctgcccaacgctgtttatctaacgctttacccgcagcctcaaatgcttcacgggtgataatatgctcggcccccagtttacgtaaataatcgtgattgctggctctgccactgagagcggtaacctgatagccaagtgcggttaataaactaattgcggtgctaccgacaccaccgctggcacctgtaaccaaaatctcaccactatcgggtgttatgccaccttgttctaacgccatcacacaaagcatggcagtaaaaccagcggtaccaatgatcatggcattttttaacgacagtccttcaggcagcgccgttaaccaatcacctttaacgcccgctttttgtgctaaaccgccccagtggttttcacctaccccccaaccggttagtaacacatgttgtccaatatgaaaacggggatcttctgtatggtgaaccacccctgaaaaatcgataccggggaccatcggaaattggcgtagaatttttcctttacctgttatggctaagccatctttgtagtttagtgtcgagtagtggacatcaacaatgacctcatgaataggaagttgtgattcatcgatatgttggacgccggcgctaagtttatcgctgtgttgttcgactaataatgctttcatgatgacctcttattgctatccgtttctgtcatgataggtgattttttagcaagcgttgtgattgtgcacaatatctcgtgtaataatgagacaaattaacgctttttagtgtataaacgatgggttctatgttcatttaagcagagattattctgagttttacatttttgttgtgagttgatacttaaaatattttacgattgggccaaaaataacatttatcttcgtttattgaaattaagctaataggttgttttggccaccatcaagatgagtatgatgatcgctatcttcatcaaatgatggggtaaatgttatcgaaaatagatattgctgatgtgaataattaaatgaataaattttatttgaacttgaacccttacttttgtgtcacagtgtggcaaccaagtaagatttttctttgtcgatatctacgtgatttgtattgtgattaagtcaaataaatcttacgtaggatcgaatttatgcgttaatcgttttaattagcccatttttatgcagtttttttctgctccaattgggaaaagtaacgtagaatattgtgcctttatgattattcacgtgtccacttttaactaagtagcggatcgcgccttgtcgctgcttattgtggttggtagagtagacggatttttccgtcccggcttgcaggattatcctttcgtatgtttaaaaaatttcgtggcatgttttccaacgatctgtctattgacttgggtaccgccaataccctgatttatgtcaaaggacaaggtattgttctcgatgaaccttctgtagttgcgatccgccaagatcgcgcaggtacatcaaaaagtgttgcagccgtcgggcatgaagccaaacagatgctagggcgtacacctgggaatatcgcagctattcgtccaatgaaagacggtgttattgctgatttttatgtaaccgaaaaaatgcttcaacacttcataaaacaggttcataacaacagctttatgcgtccaagccctcgtgtattagtgtgtgtacctgttggtgcgacacaagttgagcgtagggctatccgcgagtcggcacttagtgcgggtgctcgtgaggtctttttaattgaagaacctatgtctgctgcaattggtgcaggtttaccagtatctgaagcgacgggttcaatggtcgttgatattggtggtgggactacagaagttgcggttatctcattaaatggtgtggtttattcctcttctgtacgtattgggggagaccgttttgatgaagctatcattaactatgtacgtcgtaactacggttcgttgatcggtgaagcaaccgctgagcgtattaagcatgatattggctcggcttatccttcagacgaattaaatgagattgaagtacgtggacgtaatttagcggaaggggtaccacgtagctttactttaaattccaatgagatcctcgaagccttacaagagccattaacaggtattgtaagtgctgtgatggttgccttagaacagtgtccgccagagcttgcttctgatatttcagaacgaggtatggtcttaacgggtggtggggcactgttacgtaacttagaccgtttattaatggaagaaacaggtattcctgttattgtggctgaagatccgcttacctgtgtggctcgtggtggtggtaaagcattagaaatgatcgatatgcacggtggcgatctatttagcgaagattaatattattgtgcgagtaagggagaaaggattcccccttaatcacaatataacaatattaacacctgttcttttacttctccgtgtgagtgatcttagagtttatgaagcctatttttagtcgggggccttccctgcaactaagattaataatcgctgtgattatcgcgatatcgttgttaattgctgataatcgcataggtgctttttcaaaagtccgtcagtatttggatactgctgtgagtcctttctattttcttgcaaatgggcctcgtcgtttccttgatcaactctctgaaacctttgcaactcgcgaacgtttacaatttgaaaatcaagcgctaagaaaagagcttcttgttcgcagtggtgaaagtcagctactggaacaatttaaacaagaaaatgcccgcttacgagaattacttggttcacctttacgtcaaaatgaacaaatgacggtaacacaagtgttgtctggtaatagtacgccttatcgagatcaagtggtgatagacaaaggcactaatgatggggtgtatgaaggtcagcctgttattagtgataaaggcgttgttggacaagttattgccgtaagtgagttaaccagccgagtactgttaatttgtgatacctctcatgcattaccggtacaagtattacgtaatgatattcgcgttattgcctcaggggctgggtgtgcggatgatctactgttagaggcactacctgcgaatatcgatattcgtgtaggggatgtgttagtcacctcaggattagggggacgctttcctgaaggttatcctgttggggttgtttcttcggtaaaagtcgataatcaacgtgcttattcggtgattaatgtgcgaccttctgctgaattacaacgtttacgttatctgttgctattatggaacgcctcagagaagaaacaagcgccaccgttaccctcagaggtttaccgtgctgccaatgaacgtttgatgcaattaatgccacaggtactgcctaactatgaacaagcggggccaccactgcctcgttctatgtcacaagagccaacggaaaatagcgccaccccaagtgatatagcaccagtaccaccaacggaaaacaataaacctcaacctaatacgaatcgaggtagatagtgacaatcaatccttatcgtagccgtgggcgttggattatttggctctcgtttctaatagctttggtgttacaaattatgccttggcctgagcaactagaagtttatcgccctatttggccagtgttgtttctgatttattggataacgtcattacctcatcgtattagcgttggaacagcatttgttcttgggatgagcatggatttagtgcaagggacaacattaggcgtaaatgcgttggcttataccctagtaagttatgttatcgcctttaaatatcaattattttgtaacttagcgttatggcaacaggcattagtggtaatgttagcgattggtgtggttgatcttactgtattttgggcagaatttttgctttctcccgtgacttttcacccacaagtattctggaatagtccagtcagtggtattctttggccatggctttattttttgcttcgcaaagtccgtcaccagttttcagttcattaacctctctggatcatgacggtatttttgtgtcaccgtcatgaggatattattgtgatcactctttaccttgcatcgagttcccccagaaggcgagagcttctgtcactgttggatgttcaatttagcaccattacaccggcaattgatgaaatttggcaacaaggtgaagcaccagaagattatgttatccgtttggcgagggagaaatctcaagagggggtacgtcaagcgacaaatgactatccggtattaggctctgatactatcgtggttcaagcaggtcgtattctggaaaaaccacgagataaagcgcatgcagcacaaatgctaagtaatctttcaggtgcaacccaccaagtgatgacggcgattgctatttcagataaaacccgaacaataagccaattagttgtcacggatgtgacttttagaaagatgacagaaagtgaaattagtgcgtatattgaaacgggagagccaatggataaagctggcgcttacggtattcagggaaaaggaggccgttttgtacaacggattgagggtagctatcatgctgttgtcggcttaccgcttgttgaaaccgaagcattgatagctcaatttttgtctctagcgaatgataaggagatttcatgacagcagagctattagtgaatgtgactccctctgaaacccgagtggcctatatcagcgggggcatactacaagagatccacgttgaaagagaagccaaacgaggtcttgtcggaaacatctacaaaggtcgggtaagtcgtgtattacctgggatgcaagctgcatttattgacattgggcttgagaaagccgcttttttacatgcttctgatattatgcctcacacggaatgtatcgcgggtgaagagcagaaaaaatttaatgttcgtgatattgcgcaacttgtacatcaaggtcaggacttgattgtacaagtggtgaaagatcctctaggtacaaaaggggcacgtcttacaacagatatcacattaccatcacgttacttggtgtttatgccgggggcttctcatgtgggtgtttcacaacgtattgaaagtgaagaagaacgtgagcgcttaaaacgcttggtagaagagtattgtgatgaaaatggcgggtttattattcgcactgccgctgaaggtgtcggcgaacatgaaataaaacaagatgctgcttttttaaagcgcctatggaataaaatcattgagcgtaaaaaaagaaataaaacgcgtattcaaatttatggtgagctcgctttagcacaacgtattttacgtgattttgcaggggctgaattagatagcattcgggttgactctaaattaacttatcatcaattacaggagtttattggtgaatatattcctgaattaaccgctaaacttgaattacaccaaggtaatcaacctattttcgatctctacggggttgaaagtgaaattcagcgcgcgttagagcgaaaggtcgagttaaaatcaggaggctatctgattatcgaccaaaccgaagcaatgacaacgattgatatcaatacgggcgcttttgttggtcatcgtaatttagaagagacgatttttaataccaatgttgaggcgagtcaggcgatagcgcggcaactgagattacgtaatttaggcggcattatcattattgattttattgatatgagtaatgaagatcatcgccgtagagtattagcttccttagaacaagcattgagcaaagatcgcgtgaaaacgaccatcaatggtttttcacaattaggtttggttgagatgacacgtaaacgaacccgtgaaagtctcgagcatgtactttgtgatgactgtcctacttgccaaggccgtggtacagtaaaatcagttgaaacggtatgttatgaaatattacgagaaattgttcgtgttcataaaaccatagacgcagatcgctttttggtttatgccgcccccgctgttgtggaagcactaaaaggtgatgaatcacatgctttagccgaagtggaaatttttgttgggaagcaagtcaaagtgcaaactgagctactctatagtcaggagcagtttgatgtggtgatgatgtaatggattcgccttgctaataaatatgatggcagaaaggagactaaatgaagcggctgtctaaatctttattattgataacccttttttgcctgattattttcgccgtagtattaagtggatttcgttattttctgcctcgtttagataattatcgccctgaaattgaaacctatttatctaaacagttcaatagcccagtcaccatgacacaggtgaaaggagaatggcaaaactttggccctgatatccaaattactgggctgtatattgataataacagtgttgaagtgagtgctgaacagatcactttctcttttgatgtttggcgttcactacttcattttcaactctattttcgtgaattaacctttgaacaattagcagtaaattacaaaaagcctatttttactgggcaaaatggtgatattactttcactgaacccgatgatatctcttccattttcttaaaacagtttgatcgatttaaattggttgatagccgtttcgtgtttttatcaccttctggtgacactagcacgctccatattcccgaattaatgtggctcaatcagaaaaaccgccatcgtgcgcaaggggaagttactttagataccccaataaatcactatggtggactaaaagtacgtcttgatctctatacgaaaaagcagggggcactggataaaggacaggtgtttgtcaccgctgatgaggttgatatttccccttggttaagccaatgggttaaaagtaacagtggccttggtgaagcgaaagccagcctatctaattggatagagatcagcaatgggcggatcacgggtagccagttacaaatccatcaaggtgaaatggattggcgtaatgaagggcgcacacatgtattaaaggtagaagatttaattctacgtatgagacgccaagaaaatggctggcttgctgatatcccttatacccgaaaaataacgatggatggtgatgaatggccagatggttatttagcggtactttatcaacctaaagaaaaacaacaggatgaagcttggcgtatccgtgctaaaaatattgaattagaacggttatctgcgttattgcctttgttctcctttttaacgcctgatgtcgtgcgccaatggcagtatcgtcaattttctggcatggtcgactcatttgctcttgatttagcccccgatgattttaaacgtagtgccattgatatcagttggcaaaatgttgcttggaaacgctggcaagaaatcccttctgtggcacattttaatggtcatttaaagggcacattacagcaaggagcgcttaattttgcgcttaataacagtgaaattgatactgctgggctttttaaagcgccacttaatatagaaaaaggcactggtacggtttactggcagcatcagggagattctctgtcgttatggagtcaagggattgatataaaagccacctccgcttgggttgccggtgattttcgttatcaaaaacaaggagagcatcaacaactgtctattctttcgggagtgaatgtgaccgatgccggtgagacatggcgctatttacctgaaaaatatgtcggtaaagatttaacacaatatctctctgacgcgattattgctggaaacgttaaaaacggtacgtttatttttcatggtgatccgcgggatttcccttttgaacaacataatggttggtttcaagtctatgcaccagtaaaacaggcgaccttcaaatatgatagtgaatggccggcactgtttgatcttaatgttaatcttaattttaagaataacggcttatggatgtcctctgataatgttcaggttggtaaagccaccgctaaaaatttgacggcgattattgaggactataacaaagaaaaaattgttattgatgcagatattgaagccacgggcgatgatttaaaagagtattttctagcttcgcaaatggcaacgattggtcatacacttgaaatactaaaagtggctggaaaaattaacgggagtttgcatctcgacattccttttgatggcgagcaggtggtcgcttctggtcaggtaaacttaaacaataacgatgtcacattagcctttatggataccaccctagaaggtgttacgggacaatttcgttaccataatgataaattagagagtgatactttaaccgcgaattggtttggtcaacctctgacattttcttttgctggtggtgatcaacgggatgcttatcaagttggtgttgatctaaaaggacaatgggatatcgggaaaattaagggattacctaatgatatacaacataaattaagcggttttttaccttggcatggcgcggtgagtgttaatattccagaaacagcggatgttaattatcaagtggatctgaccggacaagtgaatgcgctacaaagtcagttagctgcgccaagtaccgatgactttaaaaacgcttcccccattgtgatttcagcaaaagggaatagtgaaaaacttaacgttagtgccgatgcacaagatcagtggtcattaaatagtgaatgggcgttaggtgaaccattacgtctattacaaggtaatttagtctcttcctcgctcacactacctcaattaaatgatcaatcacgattgactattgctttgcagggattgcaaggcgataaatggctacctactttaatggctttttcatcattagccccttctgaaaacgcgatacgtttccctaccaatattcatattagtctgcctgaacttaattttgctggtcagcaatggattgcgccacaaacagaaattatgcgtgctgatgatggtgtaaaattatccttctcagggagtgagttacgaggtgacttatttgtacccaatacggcacaaccttggcaggtgaatattacctatctctattttaatggcgctagcccaacagaagaaaataaatccttaaaaatggcaaatgtgcctgatgccaaaaaagcagttcaattttcacttaaagatattcctgctatcaatttcgcctgccaagagtgttgggtgaatggattattactagggaatattgaaggtgcaatacagcctcgtgacggagcattattgttaactgcaggtaagcttaaaaatagcagtggcgagctatctgtgagtggtgtgtggtcagaagatagtttaggcaacagtatcactaagttggcaggtaaactaacggcaccggaagtcgatgaaatggcggcttactttggttatatcattccgattgttcagtcaccacttacggcagatttctcactgcagtggcacaataccccttggaattttgatctaaaaacactcaatggtgaagtgaatgcttctcttggaaaagggcgtattgaaaaggtggatgttgggcaagcgggaaaattattacgtctagtcagttttgatgccctgttacgtaagttgcaattcgactttagagatacttttagtgataattttgagtatgattccattaaaggtgatttgacgattaaacaaggtgttttaaacgcgaaaagtgttgctgtagatggtgttattgccgatattgctataaaaggtcaagtggatctgttggcgcgtaaaatggacttacaagtagtggtaactcctgaaatatcagctacagtaggcgttgctaccgcatttgctattaaccccatcgctggtgctgctgtatttgcagcttcaaaagtactggggccactttggagtaagatttcagttatacgttatcatgttaccggaacggtagaacaacccaagattgacgaagtactgcgtcaacttaaggaggatcaggcgttatgaaaaaagttaatgtcgcacttttgcagctttgtagcggaaaaaatataaaaaataatctggcgcaaatagagcaacagattaagcaactccccgattcagtcaagcttgtattaacgcctgaaaatgcattacttttctccagcgcaaaagattatcataaacatgctgaaattcaggggaaagggccattacaagatgcgattgctaatatggcgcagcgctataaggtgtggatcttagtgggttcaatgccattgattagccgagattctcctgagcagatcaccagtagtagtttagtttttgatgatgaaggggtgatccgcgctcgttatgacaaaattcatatgtttgatgtgaacattgatgatgaacaaggcgaatataatgaatcagccatttatcaacgtggtgaacgcttgactgtagtggatacacctgtggggaaattaggtttaacgatttgttatgatttacgttttcccggtcttttccaagcattaagagaaaaaggtgctgaaattatttctgtaccggcagcctttactcgtttaacaggtaaagcgcactgggagccattgttacgcgcgcgggctattgaaaatcagtgtattattttggcaccggctcaagtcggtacccatgatgctcgtcgcacatggggtcatacaatggcagtggatggttgggggaaagtattgaaaaagaaccctgatgcggtcagtgccctaacgctcaatattcgagtcgatagtttagaaggtatgcgtgaacagatacgggttgtgaaacataatcgctttcgcccgaaactgacacacttaataaaaaaagttaaggataaaaaagaattatgagtttagctgttgtcagcgaaagtctgttggaagcgaacaacctgagtttagatgatttagcatcgacactagagcagcttgcacagcgtcaaattgattatggtgatctttattttcaatcaagctaccacgaagcatggatattagatgatcagataattaaagatggctcttacaatattgaccaaggggttggcgttagagcgatttatggtgaaaaaacaggttttgcttatgcagaccaattaacactcaacgcacttaaccaaagtgctcatgctgcgcgtagtattgtgcaagcacaaggcaatgggcagatccatacactgggtgctattcaacatactccgttatacaacctaaatgatccattacaaagtttgtctcgtgaagaaaaaatagcactattacatgacgttgatcgtgtggcacgggctgaagataaacgtgttaaacaagtcaatgcctcattaacgggagtgtatgagcatgtgctagttgctgcaacggatggtactttagcggcggatgtgcgtcctcttgtacgtctttcagtaagcgtactggtcgaagatgacggtaaacgtgaacgtggttcgagtggtggcggtggtcgttttggttatgattattttctgactaaagaaaatggcgaaacccatgcagcgacttatgcccgtgaagcggtacgcatggcattagttaatttatcggctattgctgcaccagcaggtacaatgcctgtggttttaggcgccggatggcccggtgttttattacatgaagctgttggacatggtttagaaggtgattttaatcgtcgtcaaacatcggtattctctgggcgtattggcgataaggtaacttctgagttatgtactatcgtggatgatggttcaattgaaggccgacgaggctccgtggcgattgatgatgaaggcgtaccaggccaatacaacgtattaatcgaaaatggcatcttaaaaggctatatgcaagataagatgaatgcgcgtttaatgggggtaaaaccgacgggcaatgggcgtcgtgaatcctatgcacatttgccaatgccacgtatgaccaacacctatatgcttgcgggtaaatcttctcctgaagagatcatcgccagtgtcgatcgcggtatttatgcgccaaactttggtggtgggcaagttgatattacctccggtaagtttgttttctcaacttcagaagcctatttaattgaaaagggtaaaattactaaaccaattaaaggcgcaaccttgattggttcaggtattgaagcgatgcaacaagtttctatggtgggtaatgatctcgcattagataaaggtgtcggggtgtgtggcaaagaggggcaaagcttaccagtaggggttgggcaaccgacactgaaattggataagttaaccgttggtggtactgcttaacagttgttattgttatctatttatacaaattaccccaataaaactccatcgctatgatggagtttctatttaagtgagtaaatggagctatttatgggcaaacgtctattccctgttcttattgttgtggctgttttattttttgttctgtataaaggattagtacctgaaacgcagataccagcaacagcgcctcctacatcaacaacatctacatcgtcaaagagttcaatcagtcagcctgagtctcaacgtcctttagcaattgatgaaaagacccaagccaataaagtggctgattatttgcaacaacacgctcgcttacctgatttttatatcagcaaaaaagaggctcgagctaaaggttggaatgcgaaagcgggcaatttatgtgacgttttaccaggacgggcgattggtggtgatcgctttatgaaccgtgaaaaacagttacctgaagaagcagggcgtcaatggtttgaagcagatgtcaattatcaatgtggacatcgtggtagcgatcgcctgctatattctaatgatggattaatttatttaaccaccgatcattaccgtaccatgcaaagagttgcaccttaatgaaacagattatttttgatttcagcacattggcggatcgagatgctttttatcatcagtttgctcagcaatttcaattggatgaagcatttggtaataatcttgatgcgttatgggatgtattaacaggagaaattgaattgcctgttaatattgttttcagacatgcaccgcatcattcccgcaccttccagcccattattgagataatgcaagaagcgcaagagacgctcggtaaagacctatttcgctttcattgtgaacataaaaaagccaagtagagctagctgaaagcccataagtattacaaggtatcctgaaaaccgcagtggtatcatgatttagcactgcgttttcaggagcatcagtcgttaagctgactctgagagatcttttagatattgaaacaataagcggaatgattttggcggtttattggcttctttctcttttttagcattacgaataagtgtgcgtaattgctggcgatcggccataggataaagcgctaccacttcctcaatcacttcattaccaccgtcaatcagacgtgtacgcagatcttctagtttatgtaacactaaaatttgctgattatggcgattttttagtttatctagtgcttggcggatcggctcttcatcaacattacggagtaacttaccgatatattgaatttggcgacgacgcgcttcgcgttgtaccttttgcgccaatttaattgaagcgagtagtttttcatcaagaggaacacgttcaagctcttgagcacttaactcaacaagttcggtgcctaatttctttaacgcttcagcatcacgtttaatttcacttttgctgacccaaatgatctcttcctcttcttcctcttctaacggtgtattgtcaaattcaggattgaggtagtgccactcttctggctgctttgccataataaaaattcctgttgcagagtaagccgggagtgtgatttggtgaatgaccaaaagcccgacgggtgataacattcatatatcttctattgtaactgggaaaatcgcttgttgaccacctgtcaattgatttactttagcaaaaataagtaaaaagtgatgttctccttaggaaaatggttctcaatgaataatacagatcaggtaaaacagctggaagaggcagtttctcttgcactggagatcgccgcaaaacagtgtgacggtgcagaagttgcaattaataaatcaacaggcataagcgttagtacacgctatggtgaagtagaaaatgttgaatttaatagtgatggtgcattagggatcaccgtctatcagcaacaacgtaaagggagtgcatcttctacagatttaagtcctgatgcgattaaacgtgcagtacaagcggcagtagatattgcgcgctacacttctgttgatccttatgcagggcctgctgataaagccctgttagccttcgatgccccttttcttgatctctaccacccaacagacataacagcagataaagcgattgagctggcgtctcgtgcggagcaagctgcattagacagtgatagccgtatcgtcaataccgaagggggaagctttaatagtcatagtggaactcgtgtctttggtaacagccttggtttattaaaaagctactcttcatctcgttattcaatgtcgagttgcgttatcgctcgtgagggtgaggatatggagcgcgattatgcctataccattagtcgccgttttgaggcattacaatctcctgaatgggtaggacaagagtgtgcacgccgtaccttatctcgtctagctccccgtaaattatccaccatgaaagcgcctgttctcttctcagcggaagtagcaacggggatcttcggtcatttagtggcagccatcagtggtagcatgatctaccgtgagtcatcttgtttgttagatagcttaggaaaacagattttccctcaatggttaaatattcaagagcgtccacatattgtgggaggattagcatcaacgccttttgatagtgaaggggtacgcacatcagatgcagatattattaaagatggggtactgcaagagtggctccttactagctattccgcaagaaaattagggttaaaaagcaatggacatgcggggggcattcataactggcgtatcccagggcaaggtctctcctttgatgagttgttaaaagagatgggcacagggcttgtggtcactgaattaatgggacaaggggttagcacggtgacgggtgattattcccgtggtgcgagcggtttctgggtcgaaaatggtgaaattcagtatccagtgagtgaagtgactattgccggtaacttgaaagagatgtgggcgaatattgccacaataggtgatgatattgaaacccgcagtaatattcagtgtggatcgctactattaccagaaatgagtatcgcaggtcagtagcaccttacctttaatctcagcccataagtgggctgagatatcgcgcttacttgtattttattacgttaataagataaaaaataacacgcgaaccttcagcattgcttaacggtgtaattcaccagcagcttcaggttggtagagaatttctaatactttgaccttagtttcaaggccattaggaagctgccaactgatctcatcattgatagctaaacctaatagtgcagcccccattggcgccatgactgataattcagtcgcactatcttttaatgaagcagggtaaactaaagtacgaatacgctcttcattattttttaagtccataaaacggactttgctgttcatggtgacgatgttagcagggatatcagctggtgtaacaatgtcagcacgatctaactcttcatttaaagcttctgcaattgggctgtctgcaaaggcaggttgctctagtaatgaatctaaacgttctgcatcaagttcattgatgataattgttggctttgtcataccacactccaatttgttccaatgcaaaacaacacccccacggattaggtgggggtgttgttaaactctatgtaagataataggcggttctgtagcaaaaagaaagaggcagtgatcacagtctctttctgggatttttgttaagaaatgctaatctattgtttttaattagaattaatcttcatcaaaccctgattcaaataatgcaataatcgcatcaatcgcttctttttcatcacagccactggcttctatatcgatgtgactgccttgttcggaatctaacatcaacatcgcaatcacactatctgcttgcgcctcaacgccttcatggttacgtaacgtcaccgttgattgaaatgtattgaccaaatcaaacaatttcatggcaggccttgcatgcatgcctaaacggttttttatcgctacgcgtcgatattgggtcatttgcgcttttcaagtgttctatggcgtgattgtacgtttttccctctagagcggaaatagtcagccagttgttcagccacgtaaacagaacgatgtttgccgccagtacaaccaatagcaacagttaggtaactacgattattcgtctctaacatcggtagccaaagttctagataacttcttgtttgataaataaagttatgcacttcggtatggcgatcgaggaaggctgcgactggacgatctaaccccgtcattgggcgtaatttgggatcccagtggggattaggtaaaaatcgtacatcaaagacataatcagcatcgataggaataccatgtttaaaaccgaaagactcaaataccatggtcaattcgcgttcacgtttaccgagtaagcgtgtacgtagcatttcggctaattcatgcacggacatctctgaggtatcaataatcaggtcagcccgtgatcgtaaaggttcgagcagatcactctctgtatcaatcgccatttctagcgagaggtttttcgttgaaagagggtgtaggcgtcgagtatcactataacggcggatcagcgtatttctatcagcatctaaaaataacagttgtggagaatattccgcgggtaaactttccagcgccttttcgaaaatctccggtgattctggcatattacgtacgtcaatactgactgcggcagcggcagcatcacgctcagccagtgttttcgcaagctccggtaacagatcgacaggtaagttatcaacacaataaaatcccatgtcctcaagcgcacgcaaagcgactgacttacctgaaccagagcgtccgctgactatcatcagcaccatgaggtagctccccttaatttcccagtgatgaatatcattccactgtatgctattcgcgtcctgataaacccaaacccattaggtttattctgtgataatctgataaagctcttcatcactttgtgcggagcgtagtcggcgacataaatttttgtcagccaactgttttgcaatcaaagacagtgtgtgtaaatgttccttacattgtgttgcaggaacgagtaatgcaaacaacaaatcgacaggttgattatcaatagcgtcgaaggcaataggctcgcttaggtgaagaaacacaccaacaactttttcagtttcatcactttcaatacgcccatgagggatagccaatccaccccctatccctgttgtaccgactttttcacgcgttaataaagcctcaaaaatcagtgtttctggtaaattcagtgcttgagctgcattctcactgataatttctaacgcgcgttttttacttgtgcaatgcacattgttatgtgtacatgccagagtaagtacgtcgctaatattcatctttgtatcgttgttcattgtcttattcacttagaccagcaaaccagatgccacagagtgacatctggtttttgttagcggattatttaggcgctgtttttaattgaacaaacgcgacatcaataacaccctaacatcgccgattgtattcccattttacaatgggaaatgaattaatgttgtctcagtttatctttgtgtttggttaattgacgagccagtttatccattaatccatcaattgctgcgtacatatcttctgcttccgcagaggcatgtaattcaccgccatttacttgaatcgtcgcttccgcaattttagtcactttttcgactttgaggataacttggacgttattaattttgtcaaagaactgaggtaatttagcgctttttgctttgacggtatcacgcagagcatcagttaattcaatattatgaccagtgatttgaagttccatagtgtcttccttctcaattatgctcaaaccaactctttacgttgatttgaaggcgggatggataatgactctctatatttcgcaacagttcgtcgagcaacctgtataccaagctcggcgagcatatttgccagtttactatcacttagtggtttcgctgggttttctgctgcgattagtttcttcactaaagcccgaattgctgttgaagaggcttcacctccgttatcagtatttacgtggcttgagaaaaaatacttcaattcgaaaattccccgaggacaatgcaaatatttttgcgttgtaacgcgagaaatggtggactcgtgcatctcaacctgttctgcaatatcggccaaaacaaggggtttcatatgctcttcaccgaattcgaaaaacgcctgctgtgtgtcaacaatgcaatgagcgacttttaataatgtctcattacggctttctaagctttttatcagccatttagcctcttgtaaattgtcacgaataaatttcccatcgctttcgttttgagctgattgcccaagcgctgcataagtctcatttatgcgtaggcggggaatgctatccgtatttaactcaacttgccagtgttctcctgatttttttaccagtacatcaggaataacatactgtgattcctctgtatcaatacttaaacccggttttggatcaagagattgaatggtctcaatcactacttttaatgtctcttcacgtagcttagtgtgacgcattaattggcgaaaatcacgattacctaataacgctaaatagtgctcaataacaagttgagtctctttcaaataaggtgtattagttggaaatgtcgacaattgaattaacagacactcttttaagtctctggcagcgacacctacgggatcaaagcgttgaatacgctttaataccgcttcaatctcatcaagctctaactcatcatcacccattccggcaagaatgtcatctgttgaaactgttaaatatcctgtttcatcgacagcatcaataatgcttgtcgcgatagcacgatcagtatcagtaaaaggtgttaggtcagcttgccaagttaggtaatcttgcagtgaagccgtggtttcaccttgatagagtggtaattcatcagccgcataatcattactggtgcctgaaggggtgcctgcggtgtaaatttcttcccattgggtatcgagaggaagatcgtcaggcatctccttttgctctagtgcatctagggtatctaacacctcattatcacgctcattgtctggtgtactatcatcactctcttgtgttgatgagctatcagaatgcgttacatccgcttgatcgtcttcttgttcaagcaatgggttagattcaagggcttgttgaatttcttgttgtaattcaagcgtagaaagttgcaacaaacgaatagcctgttggagctgtggcgtcatggccaattgctgactaagacgaagttgcagactttgtttcatagtgatgcgatggatcctcttatgttgtcatccgtgacgaaataaaagtgtcactcagatcacaggcggaagccttcacctaagtaaacacgtttaacttgctcatttgccaaaatttcttctggtgaaccatgggcaataaggtgtccttgactgacgatataagcacgttcacacacatctaaggtttcgcgtacattatggtcggtaattaatacgcccaagccataatcgcgtagatgttggataattttcttaatatctaaaacggaaatagggtcaacaccggcaaaaggctcatccaataaaataaatttaggatttgccgctagcgcccgtgctatctctacacgacggcgttcaccccctgataaagattgccctaaactattacgtaagtgactgacattaaactcttcaagtagctcttctgcacgatcttttcgttgttcggccgttaaatcatggcgtatttctaaaattcccatgatattgtcataaacgcttaagcgtctaaaaatagaggcttcttgtggcaaataaccaatacccttacgcgcacgctcatgtaacgggagtaaggtaatatcttcatcgtcgatagtaatgctacccgcatcacgggcgacaatacctaccaccatataaaaggtggtggttttccccgcaccgttagggccaagtaagccaacaatctcaccggagttaacattgaggctcacatcaccgacaacggtgcgccctttgtatgcttttgctaaattttcagcttttaacagcgccataaagtgttacttacctttgttgttaacaccgggacctttctcttgtaactgagaagggagtaaaacggtggtgacttgttttcccttaccgctaaatgcttccatttgttgtgtcggtacgagataagtgattttatcaccggtgatattactgtctaattgttcaagataagctttacctgttaaggtcaccagctctttgtccatctcataggtcattttatcaccacgacctttgattggtttaccatcatcttgtaactgatagaatgtcacagggttaccaaaagcttcaatcacgatttttttagaatcgccaccaggacgtgtaaccactactttatcagctcttatatcaatagagccttgttttaccacaacattttgtgtgaaagtggtaatgtttttttctaaattaagtgactgtttctcggaattaacaacaataggttgttgtgtatcatctttaagtgccataactgggacacttattgagaataacgtactgataattagtgtattacggatttttcgattcattagggatctcataataggtgttcacctgttcaatcagctctgcacgtttttcacgcagattgcctcgcatttttaagccgactgatttcagtccgacgccgataatagtcacttcatcatcagaggaaacatcttgtgtatccagatctgcgatagcattttctgtgttgatccgctgaagttgggagtcatcagttaaactatcaatttgaacgtcgccataaagatagagcattttactgtttgtcagtttggctttatttgcacgcactgtccatgttgcatctcctgtcggcgaataagtcgttaagacaggattagtaaaccatgtaaacttttgctgagcatagtttttgacatcatcagcaactagtttatatcccagtatacctgttggttcataaacaaaggatattgatgatttagattggtaggtgggttgaccatcttcaacaatctttccatcatcaagctcagtattgttagtatagttccagccaatcagcccaagagcaataatggctaaaatcagggtaaaccaggattttaatttattcattctgtgtcgttatacgtttaaatcgataaacctttagcttcttcaagtcgaccttgggctaataggatcaaatcacataattctcgtactgcaccgcgtccacctaaaatatgggtaacatagtcggcacgaggtgtgagtaatggatgggcatcagcaacggcaactgacagtcctactttttccattaccggtaaatcaatcagatcatcgccaatataggctgtctgttctggtttaaggtttagtgtatctaacagttgttgatacgccaaaagcttattatgctgtccttggtaaagatatgtaatgccaagtgttttggctctatcttctaaaagcttagattgacgacccgtaatgatagcgacctcaatacccgatgtaagtaaacaacgaatgccatagccatcacggacattaaacgctttcaactcttcaccgttattgcccatataaataagtccgtcagacatcacaccatcaacatcgcaaatcagcaattggactttttctgctttttgcattatttgcttgcttactgcaccgtagcaggtctctatcattgtattcatctttatccttatgaacgcataacaagcttaaacaaccccagcttgcaataaatcgtgcatatgtaaaacacctaataaaatatcactatctggttcagtgactaacagtgaagtgatatgttttgcttgcattaaattaagcgcttctaccgctaagctatctggggaaatgcgaattccgcctttcgtcattacatctgatattttggcattattaagatcaatacctaaatcaaagatacgacgcaaatcaccatcagtaaaaataccgttaatcaacatattatcatcacagataacggtcatacctaattttttacgggtgatctctaccagtgcttcgcgtaatgtcgcttctttgttaacgcgtggaatatcatcctctttattcattaaatcactgacatgaagcaataatttgcgccccaatgcaccaccgggatgcgatagtgcaaagtcttccgccgtaaaacctcgagcgcgcaataaagcgatagctaaggcatctcccatcaccagtgttgccgttgtgctggtggtaggggctaagcctaacggacaagcttctttagggacttttatacaaagatgaatatcagcagctttccccattgtactttgaggtgagcgtgtcatacaaattaaaaggatctgtttacgcttgaggacagggataagggcgagaatttcactggcttcacctgaatttgaaattgccagcacaatgtctttttctgtcaccatacctaaatcgccatgactggcttcaccggggtgaacaaaaaaagagggggtgccggtactggcaaaggtggcggcaattttatgcccaatatgacctgattttcccatgcccataacaatcactcttccctgacagtgaaagattttttcacaggcaagagaaaaatcgtcattgatatattgtgctaactcagctaatccttcttgttcaatttgaagaacctttttacctgcttgctgaaaatcaaatccggtcattttttgtaccatttattttaggttaagagagaatgtgcaacgcacaacaccgtaatataaacaataaaacaaactaataagaaaatcccctttccacggtttagccgctgtttgcgccccaatgaaaagagtgagaaaagtaggcccgcgaccaccagcacagtaaaactaaaatagaatgcttgcatattaaatgtgctaggagagagtaatgcgggcatgcctagcacaaaggtgagattaaaaatattagcgccaataatattgcctagagccagttcattttcacgtcttaaggctgccacaacggtcgttgctaattcaggtaaactggtgccaatagatagcaaggttagtccaactaaaaaaccgctgagatgatactgttgcatgatgataaaaacattatcaatgatcattcttgttgcaacagggattatcagtaatgcaattaccacccaaaatagggcaacagaattacgtggattagtttgtaattcaaaacgtgaaagtgtctctagcggtaacacatggcgcacttgtgttaaggttttatggagcatttttatcattagaaaaagagaggcgaagccgatgaaaaaaagtaaaccgccttctctcaaccctagatgaccattagaaaccaccagtcctgctaataagatgactataatcatcaaaggaagttctttttttagtaccgcagattggatattcatgggataaatcatcgctccaatcccagcaatcagtagcagattcgttaatgaagatcctattgctgtacctatcgctatctcgggtaaattgtggatggccgcgtcggttgcaacaaaaagctccggcaatgaagtgcccattcccacaataacaataccgataacggcaggagggagctttaatgattgagcaaacacacttgcaccatacaccagtcggtctgatgcatagactaataacatcaacccaacaatgagaagagacaaagtaatcaacatgccatcagttttccaacaatgagtgaaaaataaagaaaaaaccaataagacagggctgataaaaaacattattgtcaaaaggttttgctaattcaccatattttgactagccaagcacgaaaagtaaaatcaaccgtgcaataaattgctaaatagtggtgatttctttgtaacattgacaatgacctgccaaaatagcgtataaattttgtttatgcagacaggcttaaggacgttttattcatgaacgcacaaccagacaatttaattgaagtgcgcaatatgaactttactcgcggtagcagaaagattttttcgcaaatcaatctggatgtgcctagaggaaaagtgactgcaataatggggccttcagggataggtaaaaccaccttattacgcttgatggggggacaaattctgcctgatagtggtgatatttggtttgatggtgacaatattcctaagttatcacgctctgctttatatcagtcaagaaaaaaaatgagtatgctttttcaatcaggcgccctttttactgatatgaatgtatttgaaaatgtcgccttcccattaagagagcatactaatttacccgaggcgttaattcacactaccgtgatgatgaagttagaagcggtagggttaagaggggctgctaatttaatgccatctgaattatcggggggaatggcgcgcagagccgctttagcaagagcgatagcccttgatccagatttaatcatgtttgacgagccattcgttggacaagatcccattaccatgggggtattagtaaaactgattgatgaattaaaccatgcattaggggtcacttgtgtggtggtgtctcatgatgtccctgaagtactgagtattgccgattatgcatatattattgcagaacagaaaatcattgctcagggaagtgcaaaagagctacaggaaaatccagacagacaagtaagacagtttttagatggtattgctgatggacctgtacctttccgttttcctgcggggaactatcaggatgatctattaggacgaggtaattagtacgtggttaatttactagcgcggttaggcgcgcgatcactgtcgatttttgcgacttttggtagagccggcatcatgctatttcgagcattgatcggtaagcctgagtttcgtaagcagtggccattattaatgaagcaactgtacagtgttggtgttcagtcgctactgatcattatggtttctggactttttattggcatggttcttggtttacagggctatctagtactgacgacatttagtgcggaagcgagcctaggtatgatggtggcgctttctttgttacgagagttaggccctgtggtgacagcactattatttgctggacgtgcaggctctgcactgaccgcagaaataggtttaatgaaagcaacagagcagatatccagtttagaaatgatggctgtcgatcctcttagacgtgtggttgcgccacgtttttgggccgggtttattagtatgccattgctttcactgatctttgttgcggtggggatctgggggggtgctattgtcggcgtggattggaaaggcattgatgaaggctttttctgggcatcaatgcaaggtgcggttgaatggcaaaaagacttagtgaattgttttattaagagtgtcgtgtttgccattaccgtgacttggatagcgctgtttaacggatatgacgcaatcccaacatcggaagggattagcagagcaacaacgcgtaccgttgttcattcatcgttagccgtattaggtttagattttgtgctaactgcactgatgtttgggaattaagtcatgcaaagtaaaaaaattgaagtttgggttggtttatttgttgttattgcactgatagcggttgtctttttaagcttaaaagtggctgatattaaagaggtgggtaatcaacctacttatcgtgtctacgcaagttttggtaatattggtggtttaaaagagcgttcaccggttaaaatcggtggggtggttattggtcgcgttgcctctattaccttaaaagaagagatggaaggtaactatcgtcctgaagttgctctcgatattttaaacatttatgaccatattcctgacagcagttctctttctattcgcacatcaggtttattaggtgaacagtttttggccttaaatcttggcttttatgatgaagatttaggttctgattttctaaaggatggtggcagaattaccaatacccattcagccatggtgcttgaagatttgattggtcagttcctttataaaaccggtgacggagatggaaaaacaacctctgactcaaaaacgcaaaccgaacaaccagcattaccttaatgatcattcgcttacggtgtggtttatttagtgcaccgtatttactgaaatataatcccaagaggaagcgagtatgtttaaacgcttattaatggtcgcattattggtgataacaccttttgcgatggcggtcgataaaaccaatccttatgctttgatggaagatgccgcgcaaaaaacctttgataaattaaaaaccgagcaaccagaaatccgtaaaaatccagaactgttacgtgagattgttcaacaagagttgttaccttatgtacatatcaaatatgccggagcattagtgttagggccttattatcgtaatgcaacgccggctcagcgtgatgcttactttgccgcttttaaagattatcttgcacaagtatatggtcaagcattagcaatgtatgaagggcaagaatatcgcatagaacccgctaaaccttttgcggataaatcaaacttgactattcgtgtcactattattgataaaaatggtcgaccaccagtacgccttgattttcaatggcgcaagaacagtaaaacgggtgaatggcaagcctatgatatgattgccgaaggcgttagcatgatcaccaccaaacaaaatgagtggtctgatattttaagtgcgaaaggggttgatggtttaactaagcaattagaaattagtgccaaaacaccgattacattagatgagaaaaaatagtatgtcagcttcgttaaattggcaaaaagagggtgaaatactctcttttcaaggaacgctagatagagaaacgttattgccagtttggcaacaacgtaaagcgttattagctgatattaatatcatcgatatttctcaacttgatcatattgactcaaccggattagcactttttgtccatctaaaggccgaaatggaagcacttgagcgtcaatgtgttattcaaggtgttagtgagcgctttcaaacgctaatcacactctatgatcttgatgaaattatgaatattgcttaatgcttttcccgataaagcaataaaaaaatcccccttattgatacttttatcattaagggggtttttcatggtttaagagtaggccggattctattaggataggcaactgattattattttaacgttgagattgagcaattatggatacaaatgaaatcaaacaagtattaatggataccctatctttagatgaagtcattgttaatggtgatggcagtcattttcaggttgtggttgttggcgcgatgtttgaaggaatgagcagagtgaaacaacaacaaaccatttatgcccctttgatggaatatatcgcagataatcgtattcacgctttatctattaaagcctacacacctgaagagtggaaaagggatcgtaaactcagcgggctttaattcagtaggtatacagcgtacagcaaaataaaaaagagagttctacagatggataaatttagagtacaagggcctacctgcttatccggtgaggtcactatttcaggcgcaaaaaatgctgcactaccaattctgttcgctgctatccttgccgaagagccagtagaattaaccaatgttcctaagctaaaagatattgataccaccattaagttacttaatcgtttaggtactaaagtcgaacgcaacggctctgtttttgttgatgctcgtcatatcaacgaattttgtgccccctatgaattagttaaaacgatgcgtgcctctatttgggcattagggccattagttgcacgtttcggacgtggtcaggtttctttgccgggtggttgtgcgattggtgcgcgcccagttgatctgcatattacaggtttagagcagcttggtgcggaaattacgctggatgaaggttatgtgaaagcgcgtgttgatggtcgcttaaaaggggcacatattgtaatggataaagtgagcgtaggtgccactattaccattatgactgccgctgttttagcagaaggtaaaaccattattgaaaacgcggcgagagagccagaaattgaagataccgcgaattttcttaataccttaggcgcaaaaatcagtggtgcaggcaccgatagcattactattgaaggggtcgaacgccttggtggtggaacctatcaaattttaccagaccgcattgaaacagggacattcttagtcgcggcggcggtttctcgtggtcgtgttgtttgtcgcaatgctaaaccagatacgcttgatgcggtattagctaaattacgtgaagcgggtgctgatattgaaacgggcgaagactggataagccttgatatgcatggtaaacgtcctaaagcggtcactctgcgtacggcaccacatcctggttttccaaccgatatgcaagctcagtttagtcttttaaatcttgtggctgatggagcaggaatgatcactgaaacgatttttgaaaatcgttttatgcatattcctgaacttatccgtatgggggctcatgctgaaatcgaaagcaatactgtactttgtcatggtgttgataagctttcaggcgctcaagtgatggctaccgatttacgtgcttctgccagcttagtattagccggttgcattgctgaaggtacgacgattgttgatcgtatctatcatatcgaccgtggctatgaaaatattgaagccaaattacagggtttaggggctaaaatcgaacgtctacattctaatgactaattaagtttagttaccctgttatcgtgattaaaaaccatagcactttattggtgctatggttttttattattcatcaagcgtatttatagatttttcactaagttaacagcatcttggttattaatgtttttgcttacatagttttttagcatgactctatttgatacaataagcgaaaaccacttactttcccatgctttataggcgtgccaagaatatcctatagaatagtctttactcatatgattcatcgaatgaaataccgctttaagatatattttttctaaggatgtatcttttatttcgataattgttgcaagataaattagccaatttgctaaatgaacatattgttcccatgcactattttcgctcgttagttttattttttcctgtattattttttctatcatattcattgccttggcatctgtcacaagaacaccaaatgcagctaaggacataattatttcataaaaattattttcaaccttgagaaaacttttagaaaagctgtgttttccactcagtactttttcgatattctctaacgaatcttctactcttttttgtacatcttgaatttttgaatttaatttatcaaaaaagtcatgaatatctaaattatcaatgactctaatgccataacaatgaaaataatactcttttaaataagattctactttctttctcgatactaaaaacatagaggaaccaataacattttctcgtgagaaatttttgtactcattaataattgctttaagattagtgtctccaagagaatagcctaatataacgattgtattttcataaatcatggagcttattttcttagaaaaataagagttatagtttataaatttaaaataatcatcagaagtaactaccatattactaggcgaatcaatagaaccatgaacatgataaatttttgtactggaagatgcttttggtattggtaaaccaggtgcaagagattgacatttttttattgggatcatttcttcgataagtttatcataatttgttgttattattcttattgaattattatctaagaaattctttacatgcttattatcttttgataaatgaatttcttttattatttctgctatcttttcatgtaaattttctccttttttttgatattcaatataaataacttgagccgcttcttctaagcttaatggattttttccatcttcgggaaaaagtgattttttgactttatttaaaccatctaatttatcacaggctttttcaagtaaagattgccagccaagagctttgttattcgttagtgctttagaaaaaccggttcctgtaaacaaacataatctatttgctgccgctgaataggctatttcatatatttcattcactttttttaccccatgttttgtaatataagtatgttaagtcatctaatttgaaattgataaaatcaccattattcatttttacaggtggtaattcactaaatataaataaataaagaggttttggcggtgttgatagtgctattttatctaattcttgccgagaggttcttttatactctgatttatttacaagacgttcagaaataaaaaatgttggcttgcaaattaagtcaccttttttcatttttttatcaaaacggacaaggtaataattatctatacgtttaatccaagctttaccgaagtatattcgaggttcatctacatattcgcttagatcttttttatcattaatataaatgaagaaatctcttaaatggatctttccttctgcaatattgagaaagaaattttttttatcgataaaatcattaacgagtcctgataaacgcttttttgaatgacgtgttttattactattttcgtcatcaatattttttgtttttaagcgtttgttgatgccattttcctcttttgatgaagggatatcatgaaatttagttttataaggtgttgagaaatcaagctcaacaatatcatcgagaataaaaggaagagcctctggatcttctttcattttttttattctacgaaattcattttcttcattgatccctattttacatgtatcactatgttcagaaacaaatttaaaatgaggaactctttttcgtaatcggtttggtttatcaagattggcacaagttacttgggcatgacaatcaggttcagtacattcaaaaagatattttgatgttattattttttttgaaaataaattatcagcttcttctgctgtaatatttctatttaattcaaggcttttggctaattctattttcattgaaaatctcttttacgtattatttttatatttattttgtattttattaaatgataaatatcatatgcttttttgaatttctgcttaatggataaaaaatgtgcgctgtgtaatgataaataactatttaggattattcacctatcagttaagtaaaaaaattaatatatattattttttattataacgtggtatatccatcattctaaatgaaattaataaaataatacctatggtaattctttgatagcaggatacagtaaagaaagtcagcctgtgttaggtcattctttattaaccgcttaccaataaaaaaggaaaaaacgctatgcaggtcacaaggaaacaagagcgtgttattcgtcaagcacttgatcattggcaacaatctggcgagctatcagcacaacagcatcaacaactagaaagtacattacaacgccttccctttgattggaaaagattgagtcgctatgctttttggatagctattgtctgcttaattattgctgccattaacctttttagtgatactgcgttaattcattatcttatcgaattatttagtgtctctgagattatgcgtgtggtatttcctgcacttattgctggtatgttttatttttggggctttaaacgccaacgcaaagaaatactatggcattacagtactgagtttattctctttttagggatattatttacggcggtttttctttggcaactcggtgagttgttagatgatggtagtggtaatattgcgccacttcttttaatgggttgcattatttatgctgtgattggttttatcagtcgctcttcattagtgtggttatttttcttattaatgttgggcaattggtttggtgcaaaaacgggttatatgtccggttggggcgcttattggctaggcatgaattatcctattcgcttcgtgttatttggctctgcattattagcgggatgctattttttgcaaaatattttaatgcgccgtcgcttattttttatgacaaagataatgggactgtcttatctctttattgcgttgtggatcatgtctatttttggtaattacgatccggatacgtggtattacatttcaagtgtgcagttattaccttgggctttattatttgctgttgttgctgtcatttgtatttatatcagtttaaaaaccgatgatggcatgttgagaggctttggactaacattccttggtatcaatctttatacccgcttttttgaatatttctggaatagcttacatagtgcaattttcttttttatcttggctatttcactgatttttattggacgtaaagcagaaaaaatttggcatgccattgaaaatagccgcatggtaaataagcaataatgtcgtgaataacaaggtaactcgcgaaagttagctatggctatgactctggctgatattctgaaattgtgacatcaacatttatttcattaccatcacgtaataaggttaccggtaaaacggtaccaggacgtgtttctgcaatatagtccatcatctccatagctgatttagccggagcatggtcgatacttaaaatgatatcgccaattttcattcccgctttatcagcaggactattgggcgtaatgcggaagatacgtaatccttggatctgtttaatatcggtatttgaagagcgaattttaggtagctctttcgcggtaattccaataaaaccacgaataactcgcccatcacggataagcttattcataatttttacggctaattgtgttggaatagcaaaaccaagtccttccgcactggggcgatagccattgtaggtgcctgaatcaaaggtcatggtattaatacccactaactcaccttcagtattaatcagtgccccccctgaattaccttcattaattgacgcatcggtttgaaggaagttttggtaacgtgttgggcttaagccgacacgtcctgtggcactaataataccttgtgtgatagtttgcccaatattaaatgggttaccaatggctaaaacgacgtcacccacatgagaaatacgcttactattgatggggatggtaggtaatttttctgcatcaacttttaatactgcaagatcggttaagggatctgagccaatcaataacccttcatagagatcaccattttgcaaagccacaataatttgatctgcattattaataacgtgctgattggtaagaatatagccccgcggatccataatcacccccgcacctagcgaggtcagctcgcgcccttcttgagaaaagcttcccattgtgctgctgtagacattaactaccgcaggtgccgcacggcgcacggctttgttatagctaaatggggcattaagaaaatcaccattaatcaggtgttcaataaagatagggcggatagaaggtaccgcaaccaaaagaatggcagctgttaaaacaccaatcaaggtagatcgcagtagcttgcttaacataaaaatcctgtatttatgtttgaataagaggatagcgtcgtaagtgtcatgagaatagcacagtttcgcttttgaaaggatatgtcagcgtagaaaatcgttttttagtgatatgaaatcaagaaaaaaaccctattaccgaagtaatagggctgaaaggaacaaataaattagatacaagtaagtggggtttaacgcgagctgttacgtaacagaagataaatttcttcgttgccacgtttaatgtttaatgcaagaaccggtggtttagcatcgatggttttacgtaagtcacctaaggagccaattggcatattgttgataccaataataaggtcgcctttttgtaaccccgatgctgctgccgctgagcctttctccacagaatctacagcaaccgctttaacttgtttgttaacatagttactgagcgttgccccttgaagtgcgggagagaagttatccgctcgcgttgcatctgctgattgtttctctagtgtaactttgacatccattggttttccttggcggatcaaaccaatcaggatctctttacctggtggtgttgtaccaacttttgctcttaattcagcaaagctattaatgcgtttaccatcaatagaaataaggacatcacctggttttataccggctttagctgcggaagagtccgccaatacttcactgacaaaagcaccgcgttgggcatcaattttaaaggatttcgctaaatcagcattcatttcagtgccgcgaatacctaaaataccgcgttttacttcaccatgtgtaatcagttgttggctgagatcacgcgccatattacttgggatcgcgaaaccaataccaatattgccaccacctggtgctaaaattgcggtattaataccgataagttcaccattgagattaactaaagcaccaccagagttaccacggttaattgatgcatcagtttgaataaagttttctaacccttccagatttaaaccactacgacctaaggctgaaataataccggaagtcgcggtttgacctaaaccaaatggattacccacagcaaccgcaaagtcaccaacacgtaatttatccgagtcagtcattttaatggcggttaagttattgggtttctcaatttgtagcagggcgatatctgtttgtggatcgctaccaattaatttggcgtcaaattcacggccatcattaatttggagttgaattttatcggctccatcaacaacgtgattattggttaatacataacctttttcagcatcaataatcacccctgaacctaagccttcaaaagggcggatgctttgttgttgtgaaggaaaatttggaccaaagaaaaatttaaactcttctggaacctgctggctttgtactcgagttccagaaacatgcacactgaccacagcgggcaagactttttctagcattggagccaagctaggtagttgttctccagatggcattaccgaaggcagggcggccatactggttgccgggagagtagagagtgataaaccaacactcatcgctaatgcgctaagtagtaattttctttttttagtcaacatgaatatgagtctcttgatcttgatattgttatcaaaaatatttattgctcaatatgagctcgatgttactaagacatatagaaataaaggaaagttcattggtaagctatcagcagggctttcttttacatggatttacaagacaatagctatctttaaaccttcccattgaatcattaactttttacaaaataatataaaataaacgccacaatagttgtggcgtttgtgtgttaatcatcttttttatcggtaggtctaaataatccagatgccccttcggaataatcccgtggcggcattttgatcggggattgatcattggctgcctctgattcacttaaccgataattaaatgggttatcttgaacaggcatgtctggcattaactcattggagctttttgccatgtgttgataaagttggcggtagtctttcgccatattgtccagtagttcagcacttcgagcaaagtggctgacaagctcgttgcgatatgtatcaagttcttcttttttagtatctaattctgcttttatagcatcttgttggcgcatggttttattaccataacgcattgccagtgcgccgataataagaccaacaactaatccaatcagtgcataaacccaaaccatggcaactccttttcatctaatagtgaggacgatggattcttataacatcataaccgctaaaaggcatgggtggaataatatccttaagcttaatatgaaaattcctgtgttacatcgatgttaaaacaattcttactgcttataatagaggcattcgcaaggtatttacttatgtcaaaattttaaggataagagagcatccatgaccgttagcacgccattatcactttatgaaaccgcgttacagcagggggattatcaacctgatgaggttcagcgacaaaccgttctccatctgcaacagttataccatgcattattaaaccggacatcaccagaaaaaagttctattactcagcggttgttaggaaagtttcgtgcgaaaaaaagcacaattgtccctgagcgtggtgtttatatgtggggaggggttgggcgaggtaaaacctggttgatggatatgttctatcaaagcttacccacagaacgaaaactgcgtctgcactttcaccgctttatgttacgggtgcaagatgaattaaaaggcttacaagggcaagaaaatccactggatatcattgctgacggctttaaagcgcaaaccgatgtactctgttttgatgagttctttgtttcagatattactgatgcgatgattttaggaacattacttgaagcgttatttgccagaggtattactttagtggcgacatctaatattccccctgatgatctctatcgcaatggactacaacgcgcacgttttttacctgctatagaacaaataaaaagccattgtgaaattttgaatgttgatgcggggattgattatcgcttaagaacattaactcaagcccatctatttttatctccattaacagagcataaccgccagcaaatggataaaatttttactcagcttgccagcagtagtgaagttgtattcgcgcccacattaaccattaatcatcgtccaatggtaatgagaaaagtggctaatggtgtactggcggttaactttgatacgttatgtgtacaagcgcggagtcaacttgattatattgaattatcaaagcactatcacactgtgttgctttatgaaatggtgcagatggggagtagaaatgaagatgttgcccgtcgtttcttagcattggttgatgagttctatgagcgtaaggtgaaactaattattaatgctgatgttgagatgagcgagatttatcaagggcaatttttacgttttgaataccaacgttgtttatcgcgtttgcaagaaatgcaaagtgaagagtatctttcacagcctcatctcgcttaattgttaaagaaactctgttttgattatggtaggatggcgctcattgtaacgcttgatgctattgattgttataaaaatggcaaaacggtacttattaagtgattacaatcgctttggcaagggagaatgcttctcttcaggtggtaatagttgatgacagagatggcgagtaggctaacaaaaatagcgccataaggtattttttgctgaaatattgaaaaagaatccaattgtttttcaattatgactcgatttttttttctgacttctctataatcttgcgaccccacgttgcagcaagttttttatttcccaaaaaactcgcattttagagtcagcagtgctactcgaaggggtaggtttgctggacacaagagtcgtgtgaacctcaatagcatttgaaccgagtgttcaccaacgtgtaactaaacattgggtaattttcaataatgaaaacttttacagctaaaccagaaaccgtaaaacgcgactggtatgttgttgatgcagacggcaaaactttaggtcgtttagcaactgaaatcgcacgccgtttacgcggtaaacataaagcggaatacactccgcacgttgatactggtgactacatcatcgttttaaacgctgagaaagtagcggtaactggtcataaacgtactgacaaagtttactaccgtcatactggtcacgtaggtggtatcaagcaagcgactttcgaagagatgatcgcccgtagtcctgagcgtgtaatcgaaatcgcggtaaaaggcatgctgccaaaagggcctctgggtcgtgctatgtaccgtaaactgaaagtttacgcaggcgctgagcacaaccacgcggcacaacaaccgcaagttctggacatttaatcgggataataggcaatggctgataatcaatactacggcacaggtcgccgcaaaagttcttccgcacgtgtcttcattaagccaggtagcggtaatatcgtaatcaacaaacgtagccttgaagtttacttcggccgcgaaacagcacgtatggttgttcgtcaaccgctggaattagttgatatgcttggtaaactggatttatatatcactgttaaaggtggtggtatctctggtcaagcaggtgcgattcgtcacggtatcactcgtgcactgatggagtacgatgagactctacgttctgatctgcgtaaagctggtttcgttacccgtgatgcgcgttctgttgaacgtaaaaaagtgggtctgcgcaaagcacgtcgtcgtccacagttctcaaaacgttaatttgttatcttttagatatcaatttgatgttgaaaaacccgtctttacaggcgggtttttttatttttaaaattgttttgaaaatgtggggttgtggccaaaaaaagcatggattaaaagcagatcaaaaatacgtttttttagagtttaatccttagtatctcttttttatgatattataaacttagtttttgtgtatattagcagattgaattgaattattcgcattgttcaccctaagtgacatgaaatctgatagaatagcctgctttagtgtctttctttcgacgatttcttaatgctgcatgctgcctatggccattttactgaggttaatgtccataaagaatttgacagtcataccaaaactattatgacaaattgatattgtgattgttttggtattgcttgattatgatatgtgccgcaaagacaaacggttttttgaacctgtaaaatacaattatcttaggataagactattatgcaggtgctactcaatgtcgtactcaatgaagttaagttatttataactttttaagttaacggcatgagtctgtttgtcttgtaggaatgggggaatggaagatgcataagcatgtttgttcctttaattgattaacttggaggttttcatggctgtcgctgccaacaaacgttcggtaatgactttgttttccggtccgactgatattttcagccatcaggtcagaattgtccttgcggagaaaggtgtcagtgttgaaattgaacaggttgaagctggtaatcttccacaagatcttatcgatcttaacccgtaccagagtgtgccgactttggtcgatcgtgaactgactttatatgattcacgtattattatggaatatcttgatgaacgcttccctcatcctcctttgatgccagtgtatcctgttgctcgtggtagtagccgtttaatgatgcatcgcattgaacaagattggtactctttaatgaatgttattgaaaagggtaacgatcaacaagctaatgcagcacgtaaacaactcgccgaagagctattggcggtatctccggtatttaaagaatacccttattttatgagtgaagagtttagcttagtggattgctacctagctcctctcttatggcgtttacctgtattaggcgtggatttaagcggtgcaggtgcgaaagatgtacaaatttatatgcaacgtgtttttgagcgggattctttccttgcgtcattaaccgaagcagagcgcgaaatgcgtttaccttcaagaggataatagagcatggagattaaggatatgtctccgcgccgtccgcatttattgcgtgcgcattatgattggatccttgaaaacgagttaaccccccacttagtggtagatgttaatgtcgtgggtgttcaagtccctatggaatatgcgcacgatggtcaaatcgtactaaatatttctccttttgcggtaagtcatcttgaattgatgccgcatcaggtactatttagtgcaagctttggtggtgtacctcgtaaagtgcgcgtacctatggcggctgtaatagcaatatatgcgcgagaaaatggtgcgggtatgatgtttgagccagagccagcctatgaggaaggttatacaccatcattgatggatgatgagcagcaagacggcagttcagcttcggccactgaaggactgtctttagtgaaagatgagacacaggctgaaaacccatcttctccagatgatgatcctgagcctcctcgtccaacaggtcgcccatcattgcgtgtagtgaaataaataacgtttttattttcattgcataaagcccagttaaatactgggctttttttatatctatttgatttttcaattaacgctatttttgcactagcaaactaatagccgtaaataaatattgaccaatctcaggtgtcatccatgtacctttagcgatttcatgatcagtttgataaatggtacggatcttggcctgaatatcactatcaccctgtgtaaactgattgaacatatttagccacatcttagcgaggttttgcacctgctctgaatctgctttttctccgcaagtgagtgcattatataatccagaaataagctcaggccagacactgccagcatcaaaatagtgctgatgtactacggcaaattgttccggagtcagatgaggtttaaaaacagataattgatattcgctaaagcctttagcaacaaaatctatcatctgtttagtaataccggtagccgtcgcaaacttatcatcagaaatatgcattttatttaaacggacaaaaaagtcgggatttcccccagtatcttgctctaaagctatcatccactctcttgaaacttgcatggcttcatttgaatcggcagatttaccttgtttaatcaaattattgacagttgaaatacgctgttgccatgcttggctttttaatgtgtgcgcagtatagaggggtaactgcgctaattcagaataagtaaaatatttatcgtacatagacatcatctccaataaagaaaaccagtcatgttgcgtaaatggagtgcctgtttgtatttgttgttgaacatgctctagctgataacgcaatttggcaatttgttgcatttgcgtggttaattggctaatgcgctcttcaattaaacaagctatctctgcactatgaccattaagaatatgaccgatgtctttcagtttgacgccaatttgacgtagcatttgaatttgcgttaatcgctctatgcttttcatatcatagagtcgataacctgcatcggttcttgcagtcggttgcaataaacctatctcttcataatgatggagagtacggaccgttaatcccgtctttttagcgatctctcctacttgaaatagcatatcttcacctcctgtatgtcatgcaggttaaaacctcacgtaacgtaagggtcaataggttaatttaaatttttttgtacgataaaacagcataaaaaaacgccctatagtgatatagagcgttttaatcagtcaattaaataaaagagattatttcagtaattcttctaaacaacccgtataaagatttaccgcagtcatcagttgttgttcatcaaaatcaaagcctgcttggtgatgtccggcagttctatcggcaccaacaataaagtaaagagatttaccaccacagcgttgtactcgttttgctaacaccgttgcatcttcacttccgccgaatggacgggttgggatcgcagtgagttctgggtgtttacccaccactttggccatcacatcaatcagttcttggtcattggttaaatcaaccgcttcccccatcacttcgctttccatttctaattggaagctatgtgcggcaccttctgccatacgtacagcattggcagccataaagctattgatctcttcattctcaccacgcacttcgatttgcatttcggcattggcaggagtgacgttacgaccttcaccagcttttaataccccaatattaatacgagacatccccttaccatggcgagagatccccagcatttgtgttgcggcatggcaagcgcctgctaatgcgttacgacctagctctggctctgcccccgcatgagaaggcgtacctttaaaacggaaatcatatttagtggtacataaaaaatgagttgggttaagaacgatttcaccactattggcgataaagcctaagtgtgagcctaagaagtaatttgcatcatcagcaatgccactttccgccattgctcttgcaccacgaacgccttcttctgcgggttggaataaaatttttactttaccgctcactttatctttattgtcgactaaccagtgagcaacccctaaaccaatagtaatatgaccatcatgaccacaagcatgcatttcgcctggatgacaagaggcgaaattttctacctgtggacgatgttgagtctctgttgtttctgttaccccaacacagtcaatatcaaaacgtagtgcaacagtaggccctggtttgccactatcgaaaatagcgacacaacccgtaagctcttgcatttcatcaagcagtgcttcgtcaacatggtgttttcttgctaccgccaatcctttttcaaccacttgacgacggcgtccaaaagcaaagtcttggttaataacttcagggccgactttaacttctaatcctaagccacgtagcactttgacgattttggcagtagttaaaaattcagaccagccaatttcagggtattggtgaaattcgcgacgccatttaattaattgttctagtgaaactgacataatcatttctccacttataacatgaataacgcaacagcgatgacgccgataatcatacccggtgcagtacgttttgcgatttccatagggttgatattggcaagaccagcacaaacaatggctgcccctgctaatggtgacattgtacgacctaatgcgcctgataatgctgctgccatacccatgtcaggaatttcataaccaaattgtgcagcgtgtggtgtgacggtttcgttgaaagcaaatgctgcagcatcaccagagccagtaataatccccattaagaatggccctaatgtaccaccccaacgggcaaattcaggtgagtgagttaagaagttgataaaggcatcaatcagacctgatgcttttagaccggctgcaaatacggctgctgcgataatgatccccagcacatccccataagcattacccatccctttaaagaactctttagtaatttgagccggattggttaatgtgatgatcagtgcataaatggcaccaattaacattgctgctggcacagatagtttaaaagtactaaatgtttcgaagaaaggcagtattaatagaattaatgggataaaaggcgcagttgcatataaataattagggcgtactgcttctggtgttgcttgagaagatgagttggcgacatctgtggctacagaagagactttaaactcttttttcactaaagcgacaacagcgagtgaaactgctgctattgctcctgccattaaactatatgggctatggcgagcgattaaatcgacgacttccatattggccatattcgctacaaaagcgttatgtgacataccagggcttaacatggaaccgatagtaccacataacaccgcaccacctgcgattgcggggtgaatacgtgccgcgattaataacggaataagcgttgcaccaacggccgctgcacatccggctgctgatgggatcgcaatattaataaaataagtgacgatcactgttgctggaataagaaagaaaccaagacgagtcaggacttttgataaaacatggactaagtgcatatcgcacttggtgtatttcatcacgtaggcaaaacccatacttgaacagatagcttgaattaatgatgatgaaaccatgcgatcactaaatgcagtgaaagcatcgagcggtgtcagacttaaaatacataacaataagccggcaccgatcaataccatacgggtttcatatttttttattagcaaatagaccgttacgataataacggctacggctataagttgcatcaccatggtgatcccctagttaattatgacaatgtgcttaatgaataaaataacccaatatcaataagttatatttttcggtaaagttatcaggtaattccattatgaagttgctaggctgacaatatttgattgttatcaagtttgcgcactgaaataaaatctatttttttagactgtgatgttattaacaattgcagtcaaataatgatggacaaaaattagcgtaaaagttaaataaaaatagataaagtaaaaattaggaaaataaattaaattaactatagagcatagatgttatttttatacaaaataaaacaactattttttgtagaaaggtgttggaggaaattattattaaacaataatgagaataattattaaaatagttgtttttaggaggggggattaatatttataatagttaaaaataaattaccccattttaataaaacagggtaatttataaataaaattgtattgttactattttagtattaaagataagtaatattgaatattgctatctttaacaagataaataacgcaagatcccttccgctgcttctcttccttgtgctatcgcggtgaccaccagatcggagcctcttacaatatcacctccagcaaacaccttaggattggtcgtttgcaaaggtaatagtggatcatcattaataataattctacccgatgatgcgtattgaatattattttcatctaaccacggatagtgtgcaggtttaaaaccaaatgcaagaataaccgcatctgcggataatatatgttcgctgccttctatatattttaattccccgttggtttgtgtttttattacacgaacaccgatgacgttattattagcatctacttcaatatcaaggggttggcgattaaataaaaattcgccaccttcttctttggcattttttacttcacgtttagagccgggcatattattttcatcgcgacgataaacacaagttactttagtggcaccttggcgaatagcggttcgtacacaatccatcgccgtatccccaccccctaacaccaccacgtgctttttattgaggtcgatataaggtgattggggatcttctgcataacccattaaatggcgagtattaccaattaaataaggtaaggcattataaacccccattgcgttctcatgggcaaaatgaccactcaaactttgataagtacccaagccaaggaaaacagcatcatattgctctatcagtgtttttagtgagatatctttgcctatttctgtattaagacaaaaggttattcccatttcgctaaataactcgcgtcgtcttaccatcagcgatttttcaagtttaaaagagggaataccgaaagtgagtaatccaccgatttcagggtgtttatcatagactacgggttttactccttggcggatcagcacatcagcacaagccaatcccgcagggcctgcaccaataatggcgacttttttatctgtcatggtgacttgagacagggaagggcgccagcccagcgcaaaggcggtatcattgatatagcgttctatattaccaatagtgaccgcaccaaattcatcatttaacgtacaagcgccttcgcataatcggtcttgtggacaaacacgaccacagatttccggtaagctattggtttgatgagaaagctctgctgcttctattattcgtccttcattggctaattttagccaattagggatatagttatgcactgggcatttccattcacaataaggattaccacagtctaaacagcgatcggcttgtgcagaggcttgctcagcagaaaatgcctcataaatctcgacaaactcaattttacgcacagctaacggctttttagtcggttcaacgcgatttaagtcgataaattgatacacattctgacccatcatttttctcctattgtgcctgaacgcgtaattcagcgactgaacggcgaggatgacctaataaggcatgaacatcactcgatttaggtttgactaatttaaagtgttgtgaccaatattcccattgagaaagtagtctttctccttgttgggagccagttagccgtacatgctctgcgatcataccgcgaagatgctctgccaaaatcgcataattagccacgggaagaagctcaatagaggcgttattgatccgttgtgatagtgtggtatcttcatctaacagataggcaaagccccccgtcatccctgcaccaaagttaatccctgttttaccaagaatacagacaataccgccggtcatatattcgcagccattatccccaaccccttcaatcaccgcaatggcgccagagtttctgactgcaaaacgttcacccgctaatccagatgcatacagttttccacctgttgcgccatataaacaggtatttcccataatcgtggtctgatgggctttaaaggcagaaccgactggcggtgaaataacaatgcgtccacccgccatgcctttcccgacataatcattggcatcacccactaaggttaattccaccccttgcgcattccagacgccaaaactttgaccagcagtacccgtaaagtgaagttttattggtgtagcagataaaccactttcaccataggttttggcaatgagcccggataacgtggctcccactgaacggtctgtgttacgaatggaaaaatagtgggtttggcttatcttttgttcgacgcccgtgatggtttgcgcaacaatacgttgatttaattctcctttatcataagtatcattgtgctcctgacaatagagcgctttacctgtaggagaggtagcggtttctaataatcctgtgagtgataatttttgctgcttactggttatcccctctaagcaagaaagcaaatccgttctgccgattaaatcggttattttccttacgccaagttgtgccataagttcacgggtttcttgggcaataaagcggaaatagttgataacgcgctcaggtaaaccatgaaaatgttggcgacgtagggtttcatcttgggttgcaacccccatagcgcaattatttaaatggcaaattcgcagatatttacagcctaacgccaccattggcccggtaccgaaaccaaaactttcagctcctaaaatggccgcttttataatatcaacccccgtttttaatccaccatcaacttgtaagcgcactttatgacgcagattgttggcaactaatgcttgttgcgcttctactagccctaattcccaagggctacctgcatatttaactgacgttaatgggctggcaccagtaccgccgtcataacctgcaatagtaattaagtctgcataagctttagcgactccggtggcgattgtaccaacgcccggctcagagaccagtttgacagaaataagcgcacggggattaatctgttttaaatcgaaaatcagttgtgctaaatcttcaatagagtagatatcatgatggggaggcggggaaatcagtgtgacgcccggtacggcataacgcagttgcgcaatatagggcgtaactttatcaccgggtaactggccaccttcaccgggttttgccccttgtgccactttgatttgtaatacatcggcactcattagataagacggcgtgacaccgaaacgacctgaagctatctgtttgatacgcgaaactttgttggtgttgtagcgtgccggatcttcaccaccttctccagagtttgaaaatccgcctaaggtattcattgcttgcgcaagggcttcatgggcttctttacttaatgcaccaattgacatcgccgcagtatcaaagcgtttaaacagttcactttctgcttcgacatcttcaattgcaataggggttgtgtcattgagagctaatagatcacgtaaggtggtaatagggcgttgttgcactaattgggaataatgttggtaatcagcatagtcaccactatttaccgctttttgcaacgcttgaaccacatcaggattataggcgtgatattctccttgatgggtatattttaataacccaccagcgtctagaggatagcgagttagccaagcacgtttggatagattaaataagtcttgttcaaaatcgctaaaatctgcaccgttaatacgattatcaaccccatcgaagcaacgtttaacgacattatcatgcaaccctacggcttcaaatagctgtgagcaacggtaagaggcaacggtggagatccccattttggacattatcttatacagacctttgttgatcccattgcgataattgagcatgacttgcgcataagtacccgacaatatttttttatcgactcgttgcgctaaggattcataagccaagtaagggtaaatagcggttgcgccaaaacctaatagtacagcgaagtggtggggatcacgggcgcttgcggtttcaacaataatattggcatcacagcgtaaattattatctaccaaggctttttgtaccgcgcctactgccataggcgcaggaataggtaatcgcgcttgagtgatatttctgtcggataaaaccagtaatactgcaccacgattaaccgcttgttgcgccgtttcacataagatgtgtagtgcggtttctaaattattttcagtcggttgataggtgatatctagcgtgatggatgaataataagggctttcttgattgagtaattgttgaaaatcactataaagcaaaatgggtgatttaaaactgaggcgatgggcttgtccttccgcttcactaaagacattcatttcgcgaccaatacaggttgctaaagacatcacatgcgcttctcttaatggatcaatcggcggattggtcacttgcgcaaatttttgtctaaaatagtcataaattaagcgtgggcgctgagaaagtacggcaaaaggcgtgtcatctcccatcgagccggtggcttcctgcccattttcagccagtacatgcaaaatcgtttccagctcttcttggctataagcgaactgtttttggtatgtcgccagtaagctatcatcaaaagcgcgctctcctgtcgcttgtggctcaggcaattgctcaaaagggatcaggcgtttaacgttacgctccaaccaaagtttatacgggtgtcgcctttttaaatcttcgtcagtttcagcagaatgtaaaatgcgaccttgataagtatctattaccattagttcgccagggccgacacgccctttttctagaacttcatcaggttgataatcccaaatgccaatttcagaagcacaggtaataatattatcggtcgtgataacatagcgagctggacgcaggccatttctatcgagtgtacaggctgcatagcgaccgtcagataacacgatccccgcaggtccatcccaaggctccatatgcatagagttaaaatcaaaaaaagcacgtagatcatcatccatttgtggattattttgccatgcgggtggcactaataggcgcatagcgcggacaatatccatccccccattaagaaagagttcgagcatattatccagtgagcttgagtctgagccactctcatttacaaaaggcgctgcagtttgtaaatcggggatcagcggcgtatgaaatttataggctcttgctcttgcccattgacgatttccggtaatggtattgatttcaccattatgggcaagatagcgaaagggctgcgcaagcggccattttggggtggtattggtggaaaaacgttgatgaaaaagacagatggacgattccatccgtaaatccgctaagtcagtaaaaaagcgaggcaaatcaattgccatgcacagccctttatagacagtcactaaattagagaggctacaaatataaaaatcattatcggtaatacgtttttcaattcggcgacgagcgacaaataagcggcgctcaatatcattaatacgccatccggcaggtgcattgacaaaaatttgttctattgacggtaaagaagagagggcgatactgcctaaaatatctgtgttagttggtactttacgccagccaacgatagagagtgtttctcgttgcaattcttcttcaacaatttgacggcactgtgcagcgatagcattatcttggcttagaaacagcatgcctactgcgtaattgttcgctaaatgccagccattttcttcggcaattaactgaaaaaagcgcgttggtttttgtaataataacccacaaccatcgccggtttttccatcagaaaggatcgcgccacgatgttgcatacgggcaaggccatggatcgcatttctgacaattttatggctggctttcccctcaatatgggctattaacccaaaaccacaattctctttttccgctgttttttgatagagcatagtttgcttcctactcagtttatgggcacctcaagaacgagcgcaaaaggaacgattttgtctcaagggtgtaggtaaatttatgggtgctcatcgggtgatggtgtctttagctttgctatctcggttttttattttgctaagctactagtcaaattatcgataaataaaaaacaggtcaatcagcaaggatatttgactatagccagcgtgatgcgtgttttttttctttaattatttgataaataaaaatattatttgaaaattatttcattggttatgggatggtgagtgtgagctatctcactttttttacggggttctgctttattgcattctttgatgttagataatgccagtgaatttatcttaattattaatctattttagtattttattgtttttatactttttatctaaaaaaagacaaattgcattttttaatttctctctttggtaaagaatataactattatttatgtaatacctctataaattgtttttataaataccctcgggaaaaaggaggatcactgatacaaaataatgcaaaggcaagatacaaggtgaaaaatcgtgttttggctacaattttctgaatgttcaccacttcgtcaatgtatttttaaggtatcattctctagattcaatctattggagttttcaatgaaattgctcaaagggcttgcccaatattatgtagatttaatgatgaggctagggttaatccgcttctcattactgttagcatccgcattggttgtattagcgatggtcgtacagatggccgtgacattcctacttgccggtgatgtcactagtatcgatctggtacgctctatcttctttggtttgattattaccccttgggctgtctattttctttccgtggtggtagagcaacttgaagaatcacgacgtcgtttatcgcggatggtcgataaattaggcgtaatgcgacagcgagacttagagctgaattcacaattaaaagagaatattgagcaattaaatttagagatccaagagcgtgaaaaagtagaaaaagcccatcttgaactattggaaaaactcaaaagtgaaatgaagcgtcgtgaattgacgcaaattgaactagagcaacaatcttccttgttacgctccttcttagatgcctcgccagatctggtctactatcgcaacgaagataatgaattttctggttgtaaccgtgctacagagctattgaccggtaaaagtgaaaagcaattaattggcttaacacctctggatgtgtatgacgaagatatcgccgtcaaagtgatggaaaccgatgagaaagtctttcgccataatgtgtcactcacttatgagcagtggttggtgtatccggatgggcgtaaagcgtgttttgagttacgcaaagtgcccttttatgaccgaattggtaagcgtcacggcttaatgggctttggacgtgacattacagagcgtaagcgctatcaagacgcgttagaaaatgctagccgtgataagaccacctttatttctacaatcagccatgagctacgtacgccgcttaatgggattgtggggttaagtcgtattttattggataccgaattatcaccagaacagctcaactacttaaaaactatccatgtcagtgccataacgttaggtaatatttttaatgatgtgattgaaatggataaaattgagcgcagaaagatccagcttgataatcaacctatcgactttactgaatttatctctgatttagaaaacctatcgggattattagtccaacctaaagggttaaaattcaccttagaagcgcaagaaacgttaccgcataaaattaccaccgatgggactcgtttgcgtcaaatcttatggaacttaattggtaatgcggtgaaatttacccaagaaggggaaattaaagtacgtatttggcaagaagcgcctgataagttgttctttgaggtgaaagatagtggtattggtatccctcaaggtgaacttgagaaaatctttgccatgtactatcaggtcaacgacagtcaaggtggacgttctgcaacgggaacaggtattggtcttgctgtctcaaaacgcttagcacagcatatgggaggcgatattcatgtggagagtgagttaggacatggttctatctttacgctttccattgtcgctcctgcgattaaagagcaaagtgattttgaagaggatgatgaattattgcttcctgcccttaatatcttactggttgaggatattgagctaaatgttatcgtagcatgttcagtattagaaaaattaggcaacatggtagatgtggcgatgactgggcaagaggctttgcaaatgtttaagccgggtgaatacgatttagtgctgttagacattcaattacctgatatgaccggatttgatatttcaagaaaattacgtcaagagtttgatagcagtgaattgccgccattgattgccttaaccgccaatgtcttaaaagacaaaaaagagtatttagacgctggaatgaatgatgtgctcagtaaaccgctttctgtggatgcgttgacagccattattaataaattctggggagatgaagcggtttccgtgacatctagtgagtcacctcaattgttgagtaaaaatgaagagttactcgatatcgacatgctgaatcaatacatcgaacttgtcggacctcaattaatcacggatggtttagatgtttttgaaaagatgatgccaagttacctgtctgtccttgaatctaatctgacggcacgtgatcaaaagggcatcactgaggaaggacataaaatcaaaggcgcggcaggctctataggtttaaaacatttacagcaactggcaaaacagatccaatctccagaattacctgcatggtgggataatgttcaggaatgggtagacgagttagaaagagattggagaaaggatgtagaaagtttaagaaactggttggcagacgctagaaaaaaataaccccaaccgaaggttggggtgcgcgaatactgcgccaacaccagggaaacttttctactcgcttttttgattatcattacataggcgaataggatgaagctattccatacatcatacaagcaacaaaatagcaaatataagtttttttgttacaagaaacatttaaatatgtgatggcgattggtgtttacacctataaatgggtaactagtaatctactacaaatggagaaagatatgaaatcaattgcggtaattttaagtggttgtggtgtctttgatggcagtgaaattcacgaatcagtgctcacaatgcttgctttaagccaaaataaagctgaggttcattatttttcacctaatgattttcaacctactgtaattaatcatattactggagaagaaaaagcagaaaaaaggaatatgatggaggaggcttcgcgtatttctcgtggaaaaatatcgcctttatcagatgctaaggctgaaaactttgatgcggtaattatccccggaggttttggtgcagcaaagaacttatgtaatttcgccacgaaaggtgttcagtgtgaaattaaccaacagctcttaacttttgttcaaaagatgcatcaacagaaaaaaccactaggtttaatgtgtatcgcccccgttatgttaccaaagatgttaaatgccccagtaaaactaaccattggtaatgatgcaaaaacggcagaaatgatcaccgaaatgggagggatacatattaattgtcctgtcgacgaaatagtggttgatgatgagtatcgggttgtgaccacccctgcatatatgctggcagaatcgatagcacaagcgcaggtggggattgagaagctggttaaaaaagtactagaaatggcataacaatagagtgaatacagcagatggtactagtgagaaagttaaagaaactattaattattctaattgctttatggttagggatagttgtcctgttttcttttttaccggtgcctttttctgctgtaatgctacaaagacaaatttcttcgtggagtaagtttgatttttcttatgtatcccattctacatgggttaatgaaaatgagatatccccacagatctatttagcggtaatagcctctgaagatcaaaattttccaaaacattggggatttgatttcgatgcgattgaaaaagttttccaaaatagcctgcaaagctcaaaaacgatacgaggtgcctctactatttcacaacaaacggtcaaaaacttatttttgtgggatgggcgtagttggataagaaaaggacttgaagccggaatgacgccagtggtggagctaatttggtctaaaaaacgtattttaaccgtttatctgaatatcgtagagtttggcgacggtatttttggggttgagcaggcttctcagcactattttcgcaagcctgctaaacaactcaccgcccatgaggcggctttattagccgctgttttacctaatccacatattcttcatgttaataagccttccgcgtatttgctaaaacgtcagcagtggatcttaaatcaaatgcggttaatgggaggaacttcgtttttaagcaaaaatgcgttgttataaccgttaaaatactttttttattgattcgtcattttgtgacgccattgttgctattgcattcggatcgtttgcttggcgagattgagtgcgaaattgcgatggtgtcataccatatttacgtttaaatgcgtcacaaaaataagcattactaccaaaaccacagcgatgacttatttgaaacacagaatagttagaaaaggtgaggtaatttaatgcgatccccattctgacatccaacagtaattggcaaaacgaaacgccctctttacttaaatggcgacgtaatgttgatggtgtagtatagagcgtttttgctacatcctctaaatgccatttacgttgcggatcttgtgttattagatgagtgatcgcctgattttttggctcatcataattaaaacgaaaaatattaagaatatcgaccccttcgtgataaaccgccagcaaaataaaaaagaggctctgttgcataaacagggtctcttgagagggggtgccatgttcaagcggtagacattgctgaagtaacgtaaaattagttttaaccacctcaggtgttgatagatgataatctggaagatgacgagtaatcggcgcccctgattttattaatggtttgagtaaagagaacacagattgtaattcagtttcagacagtactaaggtatgtaattcaatcggtttggtcgggaaaaaatttgtcacatcacaagaaacttgactatatttaggaataatcaacgtgagattagtggtgactgtgatagtttgcccattaatacaaatctcaccttttgcaccatatactatcgcgatcatcgggttttcgatgtaaaacgtttttaaggatatttggttagaagaaagtatgtgtttgtattccattgtcttagatataccacaggcaagttcaaaatgaacatgggttaaaataaacaaagcttaaagttaaccacttaatttgtgaacttataagcagtaagcatgggttttattatcacaatattcctattgcgaaaccgcgtcgttataccgaatagtataagagtggctcagaatataatcttgttgctgagcaataacaatatcgatatctgttcattttttacttttatttttaccattgttattttttctaaacaaattgctgtttatttaaaacgcattttttgaaactcggtgtaaaatcgcgcggcattgatggagcgctttatcctgtttgaggaaaatgcaatttatctttattcacaccctacccaacattcatttcattattttctcggtgattttgaatgacataatctgatgggtagtgcggtatatattcgtctatttcctgatttatttgatcaattttgccaagttggcaggagtgggtatgcctgacttttctgagaagggttggcttgctgacatcgctttacgatatgagttaaagcgagggaagacatgtcttactgaaaaacgtcatctcggccccttaatggttcagcgacctttttatccagagcaaggtgttgcacatacctatttgttgcatcctcctggtggggtggtcggtggtgatacgttatccattaatattaatgtgcaaccttacgcacatgccctattaacaacgccgggggcgacaaaattttatcgtagtgcaggaggtactgcatcgcaaacgcagacattgacggttgcacaagagggctttttagagtggttaccccaagagaatatcttttttcctgatgctcaagtgtgtttaaccacacatattcatttagcctcatcagcgaaatttatcggctgggaaatgcagtgttttggacgcccagttttaaatgagtggtttgaaactggcaaggtaaaagggcgcttaaatttttatgttgatgagagattaattttaacagagtcaatgcgggttgaaggcttacaaaaacaagctgccgcaatgcgtgaatttcctatgtttggctcgctttatatttatcctgcaaccgatgcattaaaagagattattcaacaccatttagagaaggtaaatcccctagttgaatatggtttaacggatgttgatggcattttagttttacgtgtattagggacgcaaaccgagccgatgatggcgtgttttgcgcaagtatggcaaatcgtcagacagcactggctaggttattgccctgagccaccgcggatctgggcgacataatcgtttattttaggagcagaaatggaattaacaccaagagaaaaagataaattactgctttttactgcaggccttgttgcagaaagacgtttagctaagggattaaaacttaattaccctgaagctgtcgccttgattagttgcgccattatggaaggcgcacgagaggggaaaacagttgctcaattaatgagtgaaggacgtactgttttaaccgcagagcaagtaatggaaggggtgccagagatgataaaagatgttcaagtagagtgcactttccccgatggcaccaaattggtttcaattcactcacctattgtgtaggtaataacatgatccccggtgaaattagagttaatgcagcattaggcgatattgaactgaatgctggtcgcgagacaaaaaccatacaggtggctaatcatggcgatagacctgtacaagtcggctctcattaccacttttatgaagtgaatgaggcactcaggtttgcacgaaaagagacattaggttttcgtttaaatattcctgctggtatggctgtgcgcttcgagcccggtcaaagtcgcactgttgagttagtggcttttgcaggaaaacgtgaaatttatggttttcatggcaaagtgatgggtaaattggagagtgagaaaaaatgaaaactatctcacgtcaagcttatgcggatatgtttggcccaacaacaggcgatcgtttgcgattagcagataccgagctgtttcttgaaattgaaaaagatttcaccacttatggcgaagaggtcaaatttggtggtggtaaagttattcgtgatggtatggggcaaagccaagttgttagtgctgagtgtgtcgatgttctgatcaccaatgccattattttagattattggggcattgtaaaagcagatattggcattaaagatggccgtattgtcggtattggcaaggcaggtaatccagatgttcagcccaatgtggatattgtcattggccccggaacagaagttgtcgctggagaaggtaaaatagtcactgctggtggtattgatacccatatccactttatttgtccacaacaagcccaagaaggtctcgtttctggcgtaaccacctttattggtggaggaacaggccctgtggcgggtactaatgcaaccacagttacccccggtatttggaatatgtaccgcatgttagaggcggtggatgaattacctattaatgtgggtttatttggcaaaggttgtgtcagtcagcccgaagcaatccgcgaacaaataacagcgggtgctataggtcttaaaatacatgaagactggggggcaacgccaatggcaattcacaattgccttaatgtcgccgatgaaatggatgtacaggtggctattcactctgacaccttaaatgaaggtggtttttatgaagagacagtaaaagccattgccggtcgagtgatccatgtattccataccgaaggcgcaggtggcggtcatgcccctgatgtgatcaagtcggtaggagagcccaatattttacctgcatcaaccaacccaacgatgccttataccattaataccgtggacgagcatcttgatatgttgatggtctgtcatcatctcgatccctctattcctgaagatgtggcatttgctgaatctcgtattcgtcgcgaaaccattgctgcagaagatatcttacatgatatgggggcaatttcggtgatgtcgtcagactcacaagccatgggacgagtcggagaagttatcttacgcacttggcagtgtgcacataaaatgaaattgcaacgaggcacattagcgggtgatagcgcagataatgataataatcgtattaaacgttatatcgctaaatacacgattaacccggcactggcacatggcattgctcatacggtgggatcaatagaaaaaggtaaacttgcggatatcgtgctatgggatcctgctttctttggcgtcaaaccggcacttatcataaaaggtggtatggtcgcttatgcgccaatgggggatattaatgcggctattccaaccccgcaaccggttcattatcgtccaatgtatgcctgtctaggaaaagccaaatatcaaacgtcgatgatctttatgtcaaaagcgggtattgaggcgggagtgccagaaaaattaggcttaaaaagcttaattggtcgtgtggagggctgtcgtcatatcacaaaagcttcgatgatccacaataactatgttcctcatatcgagttagatccacaaacttacattgttaaagcggatggtgtaccactggtttgtgagccagcgactgaattaccgatggctcaacgctatttcttattttaaccagcgtttttattgagaatttattgaatgaaaaaatttactcagattattgatcaacaaaaagcgcttgaactaacctctacagaaaagccaaagttaaccctttgtcttaccatggatgagcgcaccaaaagtcgcttaaaagtggctttaagtgacgggcaagaagccgggctatttttgcctcgaggcaccgtacttaaagagggggatattctgctgtcagaagagggcgatgttgtcaccattgaagcggctaaagagcaagtatcaacggtttatagtgacgatccattattgcttgctcgtgtttgttatcacttaggtaaccgacatgtaccattgcaaatagaagcgggttggtgtcgttattttcacgatcatgtattagatgatatggctcgcggcttaggggctacggtggtggttggcttagaaaaataccaacctgagccgggggcttatggtgggtcatccggtggtcatcaccaccaccatgatcaccaccattaatggcactgcgatcatcaaaggaggtgcatgatgctagctgatctgcgcttatatcaattagttagcccctctcttccggtaggtgcttttacttattctcaagggttagagtgggccattgaaaaaggttgggtatgctcagcagaaaccttgtcagattggttaagcgcacaaatgaccggaacattagccacactcgagcttcctatattgcggcaattacaaacgagtttggcaaagggtgatagcgatacagtgaaatattggtgtgactttatggtcgcaagtcgcgaaaccaaagagttaaggcaggaagagcgtcaacgggggatcgcttttgcccgtttacttcctcaattaggcattgaattagacgatacgttacaacagcgggttaaacagacgcaattaatggcgtttgcgttagctgccgtgcattggcatatcgatagtgaaaagctctgttgtgcctatgtttggggctggttagaaaatacggtgatgtctggggtaaaactggtgccattagggcaaagcgcagggcaaaaaatgttgtttgctctagctgagcagatccccgctattgttgagttatcggcacattggccacaagaggatattggcagttttacgccagctcaagtgatcgccagtagtcgccatgaaactcaatatactcgactttttcgttcatgagataaagagatgcaagaatataatcaaccactgcgtattggtgttggtggccctgttggttcaggaaaaacagcactattagaagttctttgtaaagctatgcgcgatagttaccaaatcgccgttgttaccaatgatatatatacacaagaagatgcaaaaattttaactcgtgcgcaggctcttgatgcggatcggatcattggtgttgaaacaggaggatgtcctcatacggctattcgtgaagatgcttcaatgaatttggctgctgtagaagagttggcgatgcgccataaaaacttagatattgtttttgtcgaaagtggcggagataacttaagtgcgacctttagccctgaattggctgatcttactatttatgttattgatgttgcagaaggtgagaagatccctcgcaagggggggccggggatcacacattctgatctgctggtgatcaacaagatcgatcttgcgccttatgtgggagcgtcattagaagtgatggaagcggatacagccaaaatgcgtcctgtgaaaccttatgtttttactaacttaaaagagaaagtaggtttagagacgattatcgattttattattgataaaggtatgttgagacgttaatcactatgagtaccagtatcggttatcgctgttacaatgaccgatactggtaaaataatacgctatcaccacgtgatacccatcagcgatacatttagtttagataggtaaatgccgttgttactttaacaacacctttggtttcactggcaattttagcggctgcagccccttcttgacgggtcaatatccctaacaagaatacttcgccattttcggtgatcacttttacggaagatgatttgacggcatcgctagctaaaatttgtgaacgtactttagtggttaaccatgtatctgaagaagcagtgcctaatgtcacaggctcaccttggcgaacttcattataaacattgtttactccttccactttgctggtaacttgtttggccgtctcagcaaccgacatatctggactttgtccagttaacaatacattaccttgataagcggtggcgacaatgcgcgcattactgttcttgatctgttggtttttatttagagcaccagaaactcgggcttccaatgtgccatcatcaacttgttgtcctaatgaacgaggatcggttgcggttttgccagcaacggcagcagtacccaccacagcggcaccaatacagccttgtagcaatagcgcggaacaaagtactgcggtaatcggaagcaatttcatagtaactccttagtcatcctgatgtgggaataatgtattatcaattaagtcgcagagacaattgaccgttaacatctgcacttcctgtattctgactgtacgctgagaggggatcctgatctccacatcttgagggcctaataatccagcaagctcaccgccatcatagccagtcagtgcaacaatggtcatatctcgagtaacagcggcttcaacagctttaataatgcttctgctattaccatgagtggaaatagctaacagtacatcacctgcttgccctaatgcccgtacttgtttggcataaatttcatcatgttgctgatttcccataatggcggtcatcacaacactgtcggtatttaaagataatgccggtaaacttgggcgctctgtttcaaaacgatggatcatactagcagcaaagcgttgagccgttgctgctgagctaccgttgccacagcttaatattttatgtccgtttaacaaagattgaaccatcatcatggcagctctggaaatggcatcgggtaacgcttctgctgctgcaatttgagtttgaatactctctgtaaagcagacttttattctatcaagcacgttaagacctatataatctaatttaacgaataaattccgtatgatcgagaatgttttttagccatattaactggcgttgatcaaatgcacaaatatcaaagcgacagttaaccgtctcgatactttgttggcgttgagctaaccaacaattggcggcgtaccataagcggcgccgtttactgtaggtcactgagctgattgcatcaccaaattgtgcactacgccgaaagcggacttcaacaaatatccatgttctattaccctgcataataagatcaatttctccacagggatatcggacattacgctcaattaactttaacccttgttggcgcaagtaatttaacgcttttctctcataatattgtccgactagataagtacttttaggaataatcatccatgatttcctgatgttatctcttataaataaaccgcctcaaggtaaagtcaactccttatccggagacttcaaagaggcggtttatggggtaaattgcttacttattgtcccacaggttcaattttaccttgtttaaattgcatccatgggagttgtcgataaatagtgcaattatcttccacacgtaaagagccagaaacaccattgaactgtaaggttcctttggtgagttcattgtaattgtttgctaatgaccatgcatcaatacccatagcgtaaaggcgcattaatgagtaatcgttcgcaaatttactggatgctttttgcattaacggtaaatttgctcccgtcataagaggaatatcactaaattggataccgtccatttccatacgaaaatctggccccattcccccttgattactgcgtgaactgacataaatcggtgggcgttttttggtactgattgccatatcaatcattggtttaatcaatgttaactcatcgctagtggcaatgatatacacagaatcgatagcaccgtttgttgttggcattgaagcggtatctaatggcagtggtgcattgtctgttggcaatacaggggttcctgtcattcgaatacccacgccacgattaattgaactttttagactatcaagagagccgaaagtttgttgtaagacggttccccccccgctacgctgccactcatccgcaaaagtttgtgccattctttgaccgaatttattgtcaggaacgataataagtggattagatttttgttgctggcgtaagtgttgagccgcattacgagtttcatcttctggggaaagtgaaaagaaacacactgtagtagcaagaggaatattatcaacttcatttagtgctaaaacaggtaaaccactttttaattcaatagttttgatcacttcgggttttaatagtggccccacaattaaatcagcaccctcttgttgcacttgtttcagtaacagatcaatgggttggctattggtatcatacataatcacttggcgattattttggacaataggatctaattgcacgcggctattacccgcaaaggcttcggtttcttttgctgaagtagcatcactattttcagcgccttccgctgtattatcatccgttgaattatcgttttccgttgttgctgtgtctgcattcggagatgaaatacctaattctgctaaaatggaagctaaactatcttgttggggggcttctggcgctgcgttagcttgaggttgaggtaaaccttctttagcatcggtaaagccttgcataatagcattaccaaatactttagcttgtcctgttaacggtaataataatgcgatttttccgctattactgacggcagattgtgattggcgcaataacagcgtcggtaatgttagcgctcctggattgcgtggatagcgtgtttgccattcgcgtattgcttgggataatttatccgcatcatcttggttatattcataagtgttgagtaaatctaaccagccttgtaatgtattttcatcagctttgattaccacactacgacgttgctcaggtgtaagcttcgtgagtgttaaccaagtatcatcaatattttgctgatgtaatacaggatcagtgataaggggttctaggccaatataggcacggatcacatctaaagaggcttgtccgttcgcatcatcaatgactttctgaaattgtttcatttccacttgcgctttttcagcaggtgtcagtggctgttgttgttgccccgtcagggtacaacctgacataatcaaggcagaaagtattgcagtataggataaacctgttttaaaacgcacaaaaattgaggaaagcatactgtacccagtgatgttttataattatgctcaattttaaatcggtcattcggaataaacaatgaatcaacctaatcgagcagcggtaacgacatccacactgtacatagtacccacacccattggtaatctgggcgatatcacccagcgggcacttgatgtgctgtctcatgtcgatttaatagctgcagaagatacccgtcatacagggcttctattacagcattttgccattaacgcacgtttgtttgcgttacatgatcataatgaacagcaaaaagcagatcaattaattagcaaattacaacaagggctaagtatcgcattagtctctgatgcaggtacaccattaattaatgatcccggctatcatttagtcaatcagtgtcgcaaaaacggtataaaagtggtgccattacctggggcatgtgcggcaattaccgcgctatcagccgccggattaccttctgaccgtttttgttatgaaggttttttaccagcaaaaacaaaaagtcgtcaagattgtttgcgtgatttagcacaagagccacgtactttaatcttttatgagtccacccaccgtttattagatagtttagcggatatggtgacggtttggggggaagcgcgctatgttgtattggcaagagaattaaccaaaacgtgggaaaccattcaaggaatgcctgttggggaattacttaactgggttcgtgaagatgaaaatcgccgtaaaggggaaatggtattaattgttgaagggtatcaaaagccacaagaagaccattttgccccagaagtattacgcacattggcgattttacaaaaagagttacctttgaaaaaggcggcagcagttaccgctgagatttatggcgtgaagaaaaatgcgttgtacaaacacgtcattgcgcaaaatgaagcggaacaagatcagtaaaacgattttttgtttctttcgctatacattaacgcggaaaatccttataatccgccccctgagttgactagacaaccgctgctttatcgttgtcccttcggggagacggatagaggggaggaaagtccgggctccacagggcagggtgccagataacgtctgggaggcgcgagcctacgacaagtgcagcagagagtaaaccgccgatggcctgtttacaggatcaggtaagggtgaaagggtgcggtaagagcgcaccgcgcaactggtaacagtttgtggcatggtaaactccacccggagcaagaccaaataggggttcttatggtgcggcccgcattgaacccgggtaggttgctggagccagcgcgcaagttctggcctagatgaatggttgtccacgacagaacccggcttaacggtcaactcaccttatataaaaccctcgattcactctgtggctcgagggttttctgctttattgctattgctagtgtgatgataaatgattgcttactgatatcgctagctgattaagaaacgatatcaataaaaagaccacgaaaagccttttgacatcttagcgctagcatattgctatcttgaataaaagcaccatcaccacaacggatttccccaagctcttgctctgaggtttggaaatggacaccgcctttgatagattgcaaatagcctttctgaccctgtatcggcaaggttatttcatccccttgcgctaaattaatatgatagagccagatattttgccttagcatcaaactgccattatcccctgatggggaagccaataattgatattttaaatcttcatttaaagctaatttttgtgaagcgatgctctcttgttgtggacacgcgtttagccataattgaatacgagttaatggggtatctggactactatttctttcaatgtaagtttctgtattatgaggcgaaattaataaacactcgttttgtttggcggtaagtgttcgccccatattatcaagataagtcgcttcacctcttaagatcagattgacgacatccacatgaggataggtttttgctttaaactcagaatttggtgcgagcacttcttggttcagtactcttaatgtgccatagtctaaaaaatgaggatcgaaatagtggccaaaggagaatgtgtagcgagcttgtagccagccatagtccgctttgccacactgttgtgctgttctgtattttatcatcgcggtacttttcgagtcgattaatcaatatattcatcatagagatatggactgtagattgttagcaagttaatctggtgccaataatcaaattatttgatagagataagtataatgagtaaagataaagccattacattggaatctctacgagtgatggatgccattgatcgtagaggaagttttgctgccgccgctgatgagctaaatcgcgtcccatcagcactcagttataccatgcagaaattagaagaagatttggatgttgtgctatttgaccgttcaggacatcgaactaaatttactaatgtgggaagaatgttacttgaaagagggcgtattcttcttgaagctgcagataaattaacttctgatgctgaagcgctagctcgcggttgggagccacatattacgattgtgtgtgaagcattaacacccgcatctcgcttattcccgttagttgaaaaattagctgaaaaatcaaatacacaactctctttagtcaccgaagtacttgctggggcatgggaaagcttagaaagtggtaaatgtgatattgttatttcaccggatatgcattttcgttcttcatcagaaatcaatttccgccctttatataataccaccagtgtctatgttgccagccctgatcaccctatccataatgaacctgaaccacttgcagaagaaactcgcttaaaatatcgcggtattgctatcgccgataccgcaagagaacgacctgttttaactgtactgttattagataaacagcgtcgtttaacggtgagttcgattgaagataaacgtcgagcattaattgccggtttaggggttgctactatgcctattgatttaattgaagatgatttaaaagaggggcgtttacgtgtggttggccctgaatatcatcatgaaaataatattattatggcgtggcgcagagacagtatgggagaagctaaatcctggtgtttacgtgaaattcctaaactctttgccgcggataaaaaatagtttgttcgctagagtttgataatgcaattaaaaaagatccccctagaggatctttttattattaaatctattattaccaatttttcttaagtaggcgatctaagctccatttacccggacctgtgataaccagtaataaatagccacccgcaatagtcatatttttcataaacattaactgatttgcaccttctgcaaagttagtgtggaacagtagtgcggttaacagtgtaaatacactggtaaagatagccgttgtgcgagttaagaaaccgaataatatggctaatccaccccctaactctaataaaatggttaaaggcaataaggctcccggaacacccattgattgcatatactgttgagtaccttcataggcttcaatttttccataccctgcgctgataaataaaattggcatgagaatacgtgcgattaataaggcaatgttttcaaaattcttcatgatgtttattcctgataaaattttatattatttaatatatctgtattttatttgtttaattgccagtttttagtgtaaataaccactgtttggcttgagatatacaataaagaaaaaataatatggaggatattaagaagaattaacattcttacacaaaaaaattgatgtttagtcagcggtttttttgacagacttctgtaatgtgcgtattaaaccaacagcgcctatcgcccgtcgtccccaacgaaccagttttttagggtgcttaatgctataaagagataccacgcttgcccctattaacaagataggttttaacgaggttaagatattccatgctttatcataaggtgctgtgacctctaaccatgtttgcccctcttgcgctaattgagtgcgctgttgttgaatttcatccaacaacagctttttgcgtcttgctaatgctaaggtgcgtctattttgtttgctcatcgcgatattgctccaaaagacgcttatctaattctagttgttggcgagtatcacctaacagcgttgaattacgggcttttctcaatgtcatgatagcacctattaaggcaccaactagcaaaatagccgttgtaatcgctaaagcatgaatacgatattcaggtgggatcacccaaaagaggagaataagtagactcattaagccaaaggcggtgagtaataaggtgatccccgccattaaaataagctgaataagtgtaattttttcttcttctagttcgatggcgattaattttaggcgggtttcaaccatgccaacgataacagcgccaatacgactaagagaattcagaaccccggatgcggggccctgtggtctttgagtatcactcattatggattaacgtttcgaaagtagaacaccgagtacgacacctactgccgcgccaataccaacacctgtccatgggttttcacgcacatagttgtccgctttacccgccatttctttagtgttatcgacgatttctctacctgcatcactgagttttgcacgagagccacgtagcgcatattcagctttttctcgtaaactttgtaattcctcttttgatttatctgccgaggagttcagaacttcttctagagtatcagccagagattttaattcactacgcagatcttcatttgaacgttggtgtgacatgagtaactcctttaatcaagatatgaggttatacctataacaatagactagatttaccatataataaaattaaataatgacttaattccctaaaaaagagaaaagtcttattcttgccaagggtgatattaaaaaaataatcagtaatagcttgaaataaaaaacaaaagcctgttttaatcataaaacaggctttaagatgctaaatattaacgctatagaaaataatagaaatagcgatagattacggttgattactctgtttacttttcttcttaatgacgacccatacactcccgattaggccaatcactaataaacaaacaggcagtagcatcagaaaattcattaaatgatgctcatattggcggaataacggactatttcctaataaatagcctaaggtggttaaaataccaacccataacagaccacttagccaattaaaaacttgaaaacgaccgttttgtaagccagcaaggccggcaatagtcggcaataatgttctaacaaaagcgagaaaacgaccaataagtaatgctgccaagccatgtcgatggaaaagtccatgggctcgttggtggtagtgttctggtaaatgtgataaccaacttcgtacaagtcgggtgttaccaagccacttcccttgcagataacccagccaacaacctaagctagcacctgccgttagaataagtaaggttaatggaaaacccatggttcctttagcaattaacacacccactaaaattaataagctgtctcctggtaagaaagctgcgggtagtactccgttttctaggaatagtatgctgaataataaaatgtaaataatccaaagcagtgagggattcgctaaggtttcgtaatcttgatgccaaagcgccaagaacagctctcttacgatttccatataaaaggcttcctaaaactgagtcattcgggggtaaatacaaaaacattctctcttgttatctatttacccgtaatacatatcatagggtttatttttcattgtttaaaacagcaacactctaacaaaatcaataaaaactagacagaaaattttttcacttaaataccctacaagcgcttcattgagcaagaatatttgaaaaaagacattcacttttgttttccagtttaggatacgttgttttaaagaaaaaaccttaagaaaacgtaataatagaattactatgatgatgttttactgagataaaaaagcattatttttccttgctgattgaagctaatgtcatggttatttattcatcaaaaaaagtgttttaaagttgccaattggctagttaaactgattaaaatgttattaaaaagttaaaattaaactcatcaagtgattaagaaaaatcaaggtaaatagtataagagttagttttttatttaacgattaaatctaaccttatgataataataatttctttcatttgtggactgtacgttaaaaagaacaaaatcctattatgatcacaattgtgttattttgttgttaacaaaaatagctaatgatgtatattttgcaaaataagcttttcagcaagattcatttccttatactggcaaaagcaagcacacaattgcttttttaaatattattttaagtaatggaataactatggataaacaacaatccagagtacttaacctgctttttcagggaagtctcgttaaacaaatacttgctggtttaattgcgggtattttactggcttggttagcaccagaagtggctaaaatgatgagcttattaggtaacttatttattagtgccttaaaagccgttgcgcctgttttagtctgggtattggttatggcttcgattgccaaccaccgtcaaggacaaaaaaccagtatacgtcccatattagtgctttatctgctcgcgactttctttgctgcactgacagcagtagtggcaagctttgtgtttccctcagtattaacgctagttgtcaacgattcacagctatcgccacctgaaaatattgctgaagtcttaaaaggtgtattaattaatgtggtggctaaccctgtagatgcactgattaacggcaattatatggggattttagcttgggctattggcttaggtttagcgttacgccatgcaagtgatacgactaaagcattaacacaagattttgcagatgcggtaactaaccttgtgcgtgtggtgatccgtttagcgccaatcgggatttttggcttggtgtcatcaaccattgctacgactggctttaaagctttagctggctacttgcatgtcttacttgttttaattggttgtatgctgtttgttgcgctcgttgtcaacccattgattgtattttggaaaattcgccgtaatccttatccattagtatgggcttgcttacgtgaaagtggtgttactgccttctttacgcgtagttcagcggctaatattccggtgaatatggcaatgtgtcgtcgtatgaatttaaatgaagatacctattctgtctcgatcccattaggtgcgaccattaatatggggggagcggcaatcactattactattttaacacttgctgcggtaaataccttgggtatgcctgtggatattccaacagccttattgctaagccttgttgctgctatttgtgcttgtggtgcatcaggggttgctggtggctcgctactgttaattccgcttgcttgtagcatgttcggtattagtaatgatttggcgatgcaagtagttgcggtaggtgtgatgattggtgtcttacaagattcagcagagactgcattaaactcatcaactgatgtgctatttaccgcaacggtctgcatagccgaagatgagcgtttagttgccaacccattaactgaaaaaaataatggctaaagagtataagtagtaaatagatataaagagtagtaagacaggaagggtagtaagtaacaacaaaaattaataataaaaacagaaccccatataggaaactatatggggtttctggttattgatatgataaatcgagtgttaaatagtaagtgctaattctgttccctgcttaatggctcgtttggcatctaatgctttagcctcttttgccccgccaataagatggacggttttattttcttgttgtaacgcttgcagtagcggacgataagattgttgtccggtacataaaatcacgctatcagccgcgagcagttgctgttgttcattatgttcaattattactccttgctcggtaattttttgataatggcagccagttagccatttgaccccttttttctgcaatgttaagcgatgtatccagcctgttgttttacctaaacttaagccaaatttcccactcttacgttgcgtcataacaatctgtttgtcttttttaataaaaggatcggcggaggtgatccctccgcgatgcgtaagtgttgggtcaattccccactctttattaaatgcacaagggcttaaactactgcattggcctgtttgggtaagataaaggccagtgtcaaaaccaataccaccactgccaataatcaccactttttcgccggttggttgatggtatttaaggacatcaagataggtttttactatcggattatcatggccatcaatctctggaatatgagggataacaccactggctaaaataatttcatcaaaatgttgcagatgggaaagtgtcgcttccgtattattttttacgatcacccctgtgatttgcaattgccgcttaaagtagcgcaatgtctctttaaattcttctttacccggaatttgactggcaatattgagttgtccaccaatacggtcttctttttcaaataaagtaatatgatgaccacgtttagctgctgtaatggcaaatgctaatcctgcggggcctgcgccaacgacagcaatttttttaggggcttgagtcggggttaaaataagctctgtttctcgacaggcaaaagggtttacaagacaagatgccgggtgaccactgaatatttcatctaagcaggcttggttgcaggcaatacaggtgtttatctcatcctcgcgaccaagttgcgctttcaatacgaattgcggatcggcaagaaaaggacgcgccatagacaccatatctgcacagccttccgctaaaatagcttcagccacttgaggtgtattgatacgattagaagtgataagaggaatattgatttttcccatcaattggcgagtgacataagcaaattgtcctcttggtaccatagtggcaatagtagggatgcgggcttcatgccaaccaataccactgttgattagggttgctccggccttttctactgcttgagcaagataaaatacctctgaggcattagctccctcggtaattaaatctaacattgataaacgatagataatgataaagtgttcacccacagcttctcttatgccagctaaaatacgtaatgcaaaacgacaacgattttcaatagagccaccccattgatcatcgcgttgattcgtatgacttactaaaaactggttaattaaatagccttcagatcccatgatctcaacaccatcatagccagctttctgagccaacttagcgcaatgaatataatcttcaatagtctgttctatctgctcatgactcattgcttggggcataaaaggggtgataggtgattggatcgctgaaggggcgactaaattaggctgataactataacgaccagtatgtaaaatctgtaaagcgattttcccatcctgtttatgtaccgcatcagtgactaattgatgagaagcgagttgatcttctgacattagcgttgctgcatgtggcaataatacaccttgcttattaggggagatcccaccggtgacaataagtgccacccctgctgcagctctttgagcataaaattcagcaagcttaggtgcatcatgtggatcttcttctagtccggtatgcatcgagcccatcaaaatacgatttttaagcgtagtaaaccctaaatcaaggggagtaaataaataagaatagtgtgccatcagataccttttttatactggtcagatgagatatctatagcataacgagaagttgctgattaagagttgattatgttaataagttgtgatcttaatcatggaaaaggtgaatagctcctaattaaacgataataatctaaatgcctcgtcaaccataacaaataatgataataaaaattgcactcattcatattttttaatcatataataataaatacccattaatacgtattaaaaatgcccatcacattgttgattttggagacgttatgattaataaatttaatcagcttacaaaccaccccgatttaggtaagtttgttttacgtgtttcgctaggtgtcttaatgttattacacggattacacaaaatggagccaggaggacttgccggtatacagggaatgttggcaaatattaacttacctgcatttattgcttatggcacattactgggtgaagttctatgtcctatcttactgattatcggtttatttactcgattttcagcatttgttgtggcggcaaccatgggggttgcggtgctgatggtacattccggtgatcttttagccttagatcccaaaacggggggatgggcacctgaaagtgctggcttctatatgtttgctgcgattgcggtgatgtttttgggtagtggtcgttgggcgctcaaaaaagattaataaatttaatagacaataatattgaatgaaacattgctaagttattcaggttagatgaataaacgcccagaataaagatatgctgggcgtttattattaaagtgataaatagaaatttattgctttgttggcggtgttagtttgaagattttttcattttcacccaaccactgacgagcaacttgattaacatcactgacacttattccgttgacaatcgcagtctcagttaatagtcgttgatattgttggtcatctgttgccacttgagcaagtgcatcagtccaatagctagcactctctttggcttgcccatattcagttaaccaaatattttttgcctcttgtaattctttatcggtaatacccgcttgttttacgtcattgaccactttacgcgcaagtgcaattaattcatctgcccgctgtggtgatgcggtaaagtttaaacgtccggtataaaaactacttggcagcttggttagtgactcagaaaagcctagcgagtagatcccgcccgctcgttcacgaagattaagtcttaaacgttggctgacaacggtatcaagcaagttaagtgctaacagttgctgttgtgaccattgggctttggctgcgtattgaatactgatcatactcttatcgctactggcaatagggtaggttttattaaatgagcttaatttgggattaatcgccggatcagcccaaaatagacgttgcgatgaacgtgtcggcagcgttgctatccaacgttcgatcatcggtttggcctgatttaggttaataggcccactaatcaccaataccatatcggcaggctgtcctagaagtgattgattcgtttgttgtaattgttgtgcggtaaactgttgccaagggccttgtggcgaaattactaagcgctcaccgttttgatagctctctttattaatatgatctaagaaaatacgttcaactggtgttttggcgatccctaatgccgttgcttgtttttgttgctctaatttttgcccattaaattgtggtgctgtcacttttaaatgcaataaggccaacaaggtgtctaactcatcaataggcgcttcgccacgcaagccgtggaataacaactcactgtatggacgcaaactgatttgatgctgtttactaaataacgctaactctcttgcgttgtaatgcccatatccactcacttctggtaagtttaatgcccactgaaccaagcctaaactttgtcctgtttccagagaaacacctccgggaatacgcagtgatacttggatattgtcttttagccactggtcatttttaataataacttttacgttattgctcagtgtccacagctgtgttttttcaatcggaagtgtttgtgtggtgacaacagtaccggtttgctcaggtttaatatctaataccaccgcatgggttttcaatgtaaacgcaccgggatcagattgtctaatctcttgccagcgttgcgaggctttagtggcactaaatacctgactatcactatctgggccgataattgccactcgtggtgaagcttgtgttaggtattgggcaaaatagtgttttaaggtatcaggtgtaacgttatttattagttgataacttaagtttaacgcctgctttttgctttggattggcatttctaattcaagtgccgtagtaatttggttagctaaataaccatgctcatagcgctcttcaccagcagcttgttggctaagacgttttaacagcgcattgcgggcattatctaactcttgctgagatactggctgtgaggctaaacgctgtacttcagtaaatagaatatctaatgtaccttgataatcatcccctttaggatgggcaatcatcaattgttgtgagcgacgggcatctaacatcgcaccttgtgtattggcactgacggaaggcactaacccattatcaacaatggttgaaaagcgctggtttaagatggagagccacaacgagtccattaaatcatcatattgaccttggcgactatttaatggtgcaggcagtgtacgctgtagagtgaattgcacaatgcgtgagccttgctctttatcaaaaatcgtctttactaataaatctttattgtcgataaagcggtgccatgatggagagtcaacgcctttgttttcactattttttgcattgaacatctgggtaatatcagcaatcgcatcaccttgattaaaattacccactaacaccaatgccattctttcaggctgataccaagtatcgtaataacgttttgcttctttgacatcaccatgcttaacgatatctaagtccccaatgggatcacgatctagataacgactgccataataacgtaactcttcaagttggcgattaatacgaaaaccaataccttggcgtaatcgccactcctcgacgatcaccggacgctctttatcaaactcaacgggatcaaatgtcatgccaaaggcccaatcggataagatcctcaaccctgtttttatttgggtcggattggcattaggcagggataatttataggttgttgagtttaagctcgttgccgcattaacatgactccccaacttcattcctaggctttcaagctgtttaaacccagttgttcccggaaaatgagtcgtgcctttaaaggccatatgctcggtaaagtgggcaaagccaagttgtttttcatcttcttgtaccgagccacttttcaccagtaaacgcatttcaacccccgtttgtgggcgttgtagcaaatagacatttaagccattatcaagcgtaaaatggcgaatatcggggcgcagtgaaagggcattattggtatgctcagacgagttgcctgttgcacaacccagaagtgataaactgactgagataatcagtaacttacgatacatattcagtaactccagctgattgagaggaggacgcagtcggcgcttgtaatgaaattacttgctcggcaatagcgtgagtgaaacgctgatgactgactaagacaatgcccgaggttggtagatgctgtttaagtaataacaacatatgtagggcattttgttcatcaagagcggatgtggtttcatctaataaaataagatcgggtttattgagtaataaacgggcaaagataagacgttgttgttcaccaccggataagcgtgttgtccaatctgtttccagtgaaagctgattttttattttatctagccccacccaatgaagcacttcttggtactcttgttgtgagaactgagatgcttggcaaggataagccaataagctatctaagcgggcaacaggcagatacatacgttgtgggagccaactgatattggttacccgttgaatatctcctttaaaataaggccagtggccgcttaacgcacgtaacagtgttgatttcccgatacctgagctaccttcaattaccgccaattcacccgctttgagagaaaagtgaatattgttaattaataatctatcgtcttgcataaatagcgataaattggctgtcagcttagtttgtttatcatctaactcggtgatctcaggttggtgatcatgctctaacaacaccacaaaatgataaagacgggtaaccgttgcctgccatgcggcaatctctttataggagaaaataaaccagcttaatgccccagcaacactggagaaggcttgtcgtaactgcattaatccccctagcattaattcgccggcgaggaattttggcaaagcaaaaataattggcgccattgccgtggcttgctgataacccacagtaaagaaagcaaggtttctttcataacggataaggttattccagttgcggatcacccctaaaaagcgtcccatcagttcatgacgatcgctcatttcaccccgttgaccagcaatagcatcaccatgttgtttacgtgtgataagcgcagtacggtaatctgcctctttacgctgtttatccatattgattttacgtaatggagaaccaatgagctgggtgatggtgatcccgataagggtataaataatacaggcccagaacatataacccggtatattccactctttgcctgctaaagagaaagagagcgcaccagagagtgaccataaaatagtggcaaaagagataagcgttaacagtgaatgtaaaaaggtcactgttaagcgcattgtcgattcaattagtaaacgaatatcttcggcaattcgttggtcggggttgtctggctcttgcgaggttaaccgcaacatatagtgtttactattttttgatagccagcgctcaagcacttgctctgtcataccttcacgccagcgaatgatcattttttggcgtaagaaatcacccatcacgactacggtaattaatccggcaataataatcacaaactgttgaagcagtttatataaggcttgcccatcgagttgttgtagggcgttatagaagctgccattccattcattcattttgacgttaaaccaaacggatgagagggttaacgttaaagagagaattaataggaaccagcagtaaagggcggtacgccgcccccaaaaaggtgaaaccaaatagaaaaattgttttattgttttcattgcttatttgtcatgtttttattgtttattgactcggttgctcacattaacttcatcaatttttaatagtcatagctgacttgtagccagaactgtcgacctggctcgtaagatttgtactctttatcttgataggtaatgtaatcattgacatttttggtattgagtacgttattcacttcaacggaaatacctacaccgtaagcaaattcaggctgccaactgagcttggtatcccaagtaaaacgactactgtaatgacgttttttatattcaaatagcgggccgtactcacttggttttggcgcaccattattggctttctctgcttgtgaacgagctccattccattgcaaacggttaaaccaagtcactcctacatcatcccaaacactggttagctcagcggtcacttttaacggcgagttaaagttgtcagaaggtaagtctttggcattgattatttttccgccataccacaccttgtcatagttcatcccttgaacgctgggatcaaaattggcataacctgagtcttttggcgtattggttttgcttttttgccagctaatcgaagcattaaagacgtgatcggctttagcaagctcccatggttggctatttctcacggagagcgttaaggtatcgtgtgtactacgaccattattattgaagtggcgaatagcacgtttttcatcaatggttgagtctggatatttagtatcactacgcacctcatcacgaccattgcgatgcacatactgtaaacgccaagtggttgaggctatctcttgttgtagacctaaagtgaattcatcgttataaggggtttttagtgaatcaacaccatcaaagtcggtacgattagtccacttttcctccgatgtttgacagtcaaaatagcagtgttgtaaaccggcattttgcgcaccataaagggcgtaagtgagcattgaacgtccatagtaacggtttaccccaccaataattaaagtattacctgtgccccaaatatcgtaagtagcacttaaacgaggtgagaggttgtttttttgtacaaaatcatcacgatctaaacgtacaccgggacgtaaggtgaggcgtttatattgaatattatcgtcaataaaaaatgaataattggtataagacgcattatgggtacccgctagaaaacgcgtcgtttgtgataagcttcccatccattcatcattgaccgtcatgccgcgataggtatagttgtaataggttttatcacgaatataagcgcctttggtgcggctaatttcaaatccggtggtggggcgatgagtgacggtaccccacacgataggatcaaaacgcataatactcttggcgctataggtttcttgtttactacgcagatcaccttgaccaccactggagacttgattagggtgttgccaatcagtgtaatcttctactttgataaagtagtcttgatcattggtgcgtttatcttccagattttgataacctgcggttaactctaaggttcctagcgcaagttgatgcttataaagggcggtaaaactgagtccattatgttcattatcataaccggagttatacacagagctggagaacagatagctcttatagcgggcaatattacttgatagatcaaaagattgtttatcagagatattccaagaatatttgataaagtagttatctgaagtacgcgtttgatcacgataatgtgggctttgtaatacatgctctaattcgccttcaggggtgtgaacaatacccccttcagcacttatcatcatcggaatggttgattcccgacgagaagctgagaaaattaatcctgtattttccgttaaacctgtttcaaaccaaccgccatagttttgtttatcatattttttctggaaacgggctggattactaaaatcattatttgcagtatcaaattttaatttgggatcggtgaaaatattattccagcttgaacgggtagtacggtaataggcattggcatgggtttcaccagaccaacgacgactttgtacttcaactgtgcctccagtaaatccgccaaattcaacgggaatattgttatcgtaaacggtgacactatcaataagtcgactatcaagatacatcccttgctcatcactggtaatacgggtattggtttcaccattgcccgaattggccggatcaaagtcattattaaaactgacgccatcaagtttataggcattttgatagctactggagccatgaatagaaatacgtgagggcttaatttcaccttggttcatcgagttgctatcgttatttgcaaattgaaccgcaggattacttttaagtaagtcggtgacattgccatcgccagtattacgttgctttatctcttccgcggtgatgtattgtggtgctgaaacaacatctgtagcaggatgataactgcttcctatccctgtgactttaacttcagggatcacaatcgtactgctcgttgctaatggacgaataacaaagccatttccctgtgaaataatttccataccactaccgattaacaccttttgtaatgcggtatgggtttcatattgaccagagagtgcaggagcccgtaagttttttattgcgttggcatcaaacagaatttgtacctgaccttgtttagcaatagtgtttaaagaatcagctaaagattgctctggtaaagagactgatagcgttgccgcataactataaggggctgccacggtagccgttattaataatgtgagtagcgacctttttaggggcctttttttattatgtattctcatttcaccaatcccattcatagacttaataatttttgttactaagtaagagggtgaaatgagaattatcctcacctgtaaaaaagaatatttttcatgtttatttttacttattgataattaacacattatttttatcagtaaaaataacattaaccggtaaaagtagcggaagtgcagtaataaagcttttcgcgtcattaatatttgccacacctgatacctttattttggctacatcggctgatgagatatgaacgttgatatccagataaggttttaatttagtgatcacgtcaccaagtggttgttcaaagaaatggagttgcccaaaacgccagcttcctacagaatcagcattgactgaggaaatgacaaattgattatcagttgattggctaattgcttgagagccagcatataggtaagtcgcaggggatttttctgtggctttaacttcaacaatgccctcatgtacggcgacactaatttgattattttgataacgactcacttcaaattcagtaccgacaactttaattaatcgctcatcagcatggacataaaatggccgataaggattgggttttactttaaaataagcctcacctttatctaaccaaaggcgtctttgggtttggacatacgagacgcgtacctgtgtatttctatttaaaaaaactttagagccatcagcgagggtcatctctttaggaaaattgctggtggctaaggtcatattatccattaacagggcaggtaaatgactataaggaagatataacacagcaactaaacagagtgcggctgtagtgtgaataaaggggcgccagagtgaagatttccttttttctataggcacaatagtagggcgtggtaaggcttcacaactatgccaaatttccgcgatagcttgataagcttgttgattatctttatctgctacccactgtttaaaggcttgtcgttgctgtgaactcatttgctgactatgttgacgggtgaaccaaagcgcagcttgttcatcaatagattgctggcttaattgatcatgggtatctgccaaaagcgttgcaggcgcctcatctgtgtgaggttgatttcccgacttactcgtcattggtgcatttctcctgtcctgcatcgacatatcttttacaatgtaatagtgctgcggcaatatgtttctctaccatgcttatcgaaatttccatttgttctgcaatttcgctttgtgataatccatcaaagcgataaagaataaaagcttctcgacggcggggaggaagagtatcaatagcttgtgtcagtaaatctaaacgctgttgatgctcaaggacgtgcccgggatcaagctctgtcgtataggtctgtaccgcatcttctaattgataatcttcttgatagatatttttttgtttttggtttttcctccaatgatcgatcaaaacgtggttcgctattttaaataaaaaagcacgctgctcttggacaggagtttgttcttttcgatttagccatagtgtaaacacatcttgagacaaatcatccgcatcatggtgattacccgtgcgtttttggaaaaaacgtacaagctgaccataggttgattggtaggcacaactgattttttgtgctaatgatttatcgctagtcatagtctctggtgtttaaaaaagagtgaaataataagctcttactgcttctaataaggaatttttataatcaatatttagctaattttttattgtattattaataataagcaatatcatttgtgtttgtattatgcctataattcattagaaagaaaatcagaggcaagaattatgagtagtatgtcggcgacttttccacgccgttggtccttttctattggtgggttaactgccagtattgtgtttcatgtcaccttggttgttgttgctataggttggataacgacgaaagatgagcaatatgcggttttacctccagcaatgacgatgcaagtggggctttatcaattggcaaaagcagaacctaaagaggttcctgttgggcctgaacaggtgatgtcagttccagaagctgccgagccagagccgatgaaagagcaacttgatgtgcctaaaatgcctgtagtcgaacagggaacttatgagcgagttgcggaaaagccaaaggtgaaacccgtggttaagcctaagcctgtcgtggtaaaagtacctgatgatcttcccgtttcagaagcgccagcagataccacaaccgcccctttatcaggtgaaaacgcgaccagtagtgccgattttaccagtaccgcttcatcatctcgcagtggccaaatggggtgggaaagtttagtccatagccatattgatatgtataaacgttaccctcgtgcagcattacgttttaaagcgacgggagtgacacaagttgaaatttcgctcaatgcaaaaggtgagttattagatgtgagtatacaaacctcgtctggtaatcgtatccttgataaagaagcgattaacactattaaacgggcatcgccatttccggcacctgaaagccaccgtttagttaacggctctttctcatttattgcgcccttgagctttgactatcggcaaagtagttaatatcgtcattgaatagtgtaagccattgacatcctccacgccctaaaggacgtggatccctactgcgttcagactgatgtctgaatcacctcggcgggttcctgcttcaacgggcggtctgactgcaccctccctccacaggcaagcacggcatgtcctgccgctaaaatgttacgtgccccgttgatatcagcattcgctgtatatccacattcaaggcactcgaattgactttgtgactggcggttttcctttgctgtatgaccacagcaagcgcacttctgactggtgtaggctggtggtattgccactacctgaccacctcgccagagctgcttgtactcaagctgacggcgcatttcataccagccctgctccagtattgcgcggtttaaaccagatttagcttttacgttccgtccatgccgttctgtcgtaccttttgccgatttagacatgttactgacctttaagtcctcaatgacaatcattgcgtggtttttgctgatttcgctggtgactttgtgaaggtagtctttcctgatattggcaatatgagaatgcagacgttgaattttgcgcttttgtttttgccagttggcactgaatttgattttacggcttaatttccgttgaagtcttgccagctttcgctggtttactttaaaactgctgacgggcgggtataccgtaccgtctgaaagcgtggcaagttttgtaacgcctgcatcaagcccgactattgaggttgattcaggttgtggttctgtcgcttcatactcagtctgaatgctgacgtaccatttaccgcatgactgactgaccgtgacgtttctcacttctccgacgacttcacgactgttgcggtagcgcatccatcccaactttggcaatgatatacgactattggattgatcgagcttcacgccctgcgggtagcgaaaagcatcacttttaccgcgtttcttgaatcgaggaaaagcggtacgcttctggaaaaaattcttgtaagcccgttccaaatctttaagtgactgttgtaacggttgtgatggggcttccttcaaccattgtgtctctgtgtcagatttccactcaatgagccatgaagccatttttgtatagggaatgtatttattccctgcttcgtaattctcattctgacgtgctaatgcccgattgaaaacaaaacgacaagcccctgcaaagcgtctcatctcacgctcttgctgaccattgggtcttaactggaatttaaaggcttgtagacgtttcatattatctattatactttggtccatgaaaaatgaaactaatattcgccgtggcagacattgtgtattcctgatgcacgtccatttggtctttgtcacaaaataccggcgaaaaatatttgatcaggatgccattgaaaaattgcgaagctactttgccagtgtttgtgctgattttgatgttgaactggttgaaatggatggggaacgggatcacgttcatttactgattaattacccgccaaaactggcgatatctaatctggttaacagccttaaaggggtatcgagtcgattacttcgacgtgatcgtcctgatattgcccaacgtgattactacaagggggttctttggtcgccgagttatttcgcggggagttgtggtggcgcagcaatatccattatccgccagtacattgagcaacaggaaacaccgagttagttaaaaaaccgcgccttatatccccgacctgaaggacggggttttacggtgctttggataaaacgtaaagagagataataaaaaagcagagggtgagctctgcttttttgcgttcagctaaataatgattacttagtgatgcgtttatatttcatgcgacgaggttggatagcttcgttacctaatgtccgttttttatactcttcatattcagtaaagttaccttcaaagaattcgactttaccttcatcttgataatcgatgatatgagtggcgatacggtctaggaaccaacggtcatgggaaatgaccatagcacaacctgggaattctaatagcgcattttctaaggcgcgtagcgtttcaacatccagatcattggtcggttcatcgagcagcaacatattaccgccgacttggagaagtttcgcaaggtgtaaacgtccacgctcacctccggacagttcgccaacgcgtttaccttggtcaacgcctttaaagttaaagcggcccacataagcgcgacttgggatttcaaagttaccaatgcgcataatatcttgaccaccagaaacttcttcccaaaccgttttgctgtcatccatactatcgcggaactgatcaacagaggccagtttcacggtctcccctaaagtcacggttcctgaatcgggttgttcttgacctgagatcatacggaacagcgttgatttaccggcaccatttggaccgataataccgacgatagcgcctttaggaatggagaaacttaaatcatcaatcagaacgcgatcaccataagatttagtgaggtgactcacttctagcactttatcccctaaacgaggtccaggtggaataaatagctcactggtttcattacgtttttggtaatcaacgctattgagttcttcaaagcgagcaagacgagctttacctttagcctgacgacctttaggattttggcggatccactcaagttctttttgaattgatttatggcgagcggcttcagtggctgcttcttgttcaagacgcgcatctttttgctctaaccaagaggagtagttaccttcccacggaataccttcaccgcggtcaagttctaagatccatcctgcgacattatcaaggaagtaacggtcgtgggtaatcgccacaacagtgccttcataatcatgtaagaagcgttctaaccaagcaacagactcagcatccaagtggttagtcggttcatctaacaacagcatatctggcttttctaacagtaaacgacagatagccacacggcgacgttcaccaccagaaagatgttcaattttggcatcccaatctggtaaacgtagtgcttctgctgcacgctctaattggttatcaagattatgaccatcgtgagattgaataatcgcttctagctgaccttgctcttttgccagttggtcaaaatcagcatcaggatcagcataagctgcatacacttcatcaagacgattgagtgcatttttgacttcgcttaccgcttcttcaacggcttcacgaaccgtttgttgtgggtttaattttggctcttgtggcaagtagccaatttttagacccggttgtggacgtgcttcaccttcgatatcggtatcgataccggccatgatacgcagtaaggttgatttaccggcaccatttagaccaagcacaccaattttcgcgcccggaaagaagctgagtgagatgtttttaaggatatgtcgcttagggggaacaactttcccgacacgcaacatactataaacgtattgagccactataattaccctttgattataaaagagattttatctgaagtgtcagtttttgcgttaaacacaaaagaatgtaaataagcaatgaatatatgacacctaaatgaacaatagtaaagtcaatgtcagtattttgccaaagacccgaaaacgatgaaagtcgccagtatacccgatttataaaagaaaaccttaggtaaaagagaggtttttatcatccttgagtgcttgttcgaaaagtgaggaaaatttcatttaaagagggaactaacattgttaatgattatcatattagctaatgtatttattctttggatgtttaaatttgaggtgggagaggtaacgtggttaagcaaaagtggtccttcgtcttggcaattagtacattgtgtttctctgcgtgggcacaagcagattcattaagtgaacaacgaacacgttaccaagaaattaaagcagcttgggatgctaaagatacagcacaagttgaaaaattattaccgacattacaagattatcctctttacccctatcttgaatatcgccaaattaccgacaatcttgatgtggtcgctccggctgtggtgactgaatttgtcgaaaaatatccaactttgccacccgcgaaagcactaccttctttgtttgttaatgagttagcaaaacgtcaagagtggcaaaacttactgacttttagtcctaatcctcctaagcctaaagcagcaaggtgtaactactattatgctaaatgggcgacaggggataaacaaacggcgtgggttggtgcaaaagaagcgtggttaaacggtacttctatgccttcaagctgtgatccgctatttgatgagtggcaaaaagcaggaaatttaagcattgaattagtgttagagcggattaatttagcaataaaaagtggtaatactgggttagcaacttatttagctaagcgattgccgatggattatcaaacgattaacgatgccattgttgaactacaagatcaccctaatctggttgctcgttatgccacacaactttcaccaacagattttacgcgtaatattgtacaagccgcattttcacgttgggcgcgaaaagatgccgatagtgcaagagcacagcttgatagtattgccagagctcaaaaaatgacgacagctgaacgccaattaatgcgtgatacggtcgcttggcaatatatgccatatgccacaccagagcaggctaaatggcgtgatagtgtgatacaagataccgcttcagataccctgcgtgagcgtcgtgtgcgtttagcgttaagccaaaatcagcccgcagaattagctttatggttagaaagattatcacctgaaagtaaaaataaagaggagtggcgttattggcgagcgatggtgttgcaatcgcaaggtaaaaacagtgaagcacaagcgcttttacaagaactaacacaacatcgcggtttttatcctatggtggcggctgaaaagctaggtaaaccttatgttatggtaatagacaaagcgccaagtgtttcacccacaattccacagcaacctgaagtgcaacgagtacgcgaattaatgtattggcaaatggataatttagcgcgtactgagtgggcaaattatgttgccacccagcctgctaccacacaatctcaactagcgcgttatgcttttgagcaacaatgggctgacttagcagtacaagcaacgattactggtaaaatgtggaaccatttagaagagcgcttcccacttgcatggcaaaatgaatttgaacgatatacgaaagataaagcgatagatcgcaattatgcgatggcgatcgctcgccaagaaagtgcatggaacccacaagctcgctcttcagctggggcaacgggtcttatgcaagtgatgccgaaaaccgcagagttcacggtaaaacaagcaggtattaccgggtatgcaagtagtgcgcaactgacagatccggttaaaaatattgaaattggtaccgcttatcttgattctgtttatcagcgttttaatcaaaaccgtattttatctagtgcagcctataatgcaggtcctgcacgggttgaccgttggttatctgatgctaatagccaactagatgctattgcttttattgagagtattcctttcgcagaaacgcgtggttatgtcaaaaatgtactctcatttgcggtgttttatagctattttgccggagagcaacaaccggtattaactcaaactgagtggaatagtcgttattaatgagataattaagcgatttattaatggaacctctttgtcacaggataaaatatgctatagtttgtactagtttatgagtgtggctagaagaggttcccactatgctagatcctgcattatcaccagaagagaatgaacactgggtacgttttgttgagttattacgccaagcgtttgaacagggagttgaatttcctgttttacaacttttaatgacgccagatgagcgcagtgcattagcaacaagagtgcgtattgttcaagaattaatgcgtggggaattaagtcagcgagagctaaaagagctattaggggttggcatcgccactattaccagaggttctaatagcttaaaaacagcaccccatgatgtgaaattatggcttgaaaaagagcttatgataaaaaaataatcgcctattcgttagaaataaaaatgccatttaatcagttggttaaatggcattttttttaaatagcgacaagagaactatttaatcactcattcatcatcttttttgttaagttgtttataaatatcatgggtgacgggcactaaagctaatacaatcgcttgttggtaaacagaagtgcgacttaataaaccatcagtaaaataaccaatagcgccacctttttgcttaatattatcaatcttggttaaaaatgccatttcatcgccaagttcacgaccttcacgaacaccttttaagatctgttccggtagcattaaactggctgagcgagattcaccgcgaatttgctcgtgttcgataacaatccaagcaaaggtcatatcgtcttcaatacccgcttcaacacctacccaaaagtcagcttctggacgtacttgtcttgcggccatcacacgttggcgtgcgccagttctcgtttctgtatttccaataggttgctgtggaacgcggctatcgacattaatatcttcaatatcaaaggtatctttaccgaacacttgctcaaaggcgagtttgatcgcgttgatttttgctggattcgtagtggctgcaatgacatgatacataatgagttaatcatcctttgaaaaattagagcagtataacggaaaaaatgtatgttacaggtctatcttgttcgccacggtgaaactgagtggaacgtggcgagacgtatacaagggcaatctgatagcccactaacagcaatgggtgtgcgacaggcacaacaagttgctgaaagagtaaaatcagcaggtattacccacataatttctagtgatcttggccggacttgtcagacggcagagattattgcacaagcttgtcgctgtgacgtaatcacggatccccgtttgcgtgaacttgatatgggcgttcttgaacagcgagagatcgccacattaaatacacaagaagaagcttggcgcaagagtttaattgatggtacacctgatggacgaattccccaaggagaatccatggtggaattagctaatcgtatgcaggctgctttaaacagttgcttggcgttaccagagcatagccgtcctttactggtgagtcacggtattgcattaggttgcctgctaagtactgtgttaggcctaccagcttacgctgaacgacgtttaagactacgtaactgttcaatttcacgagtggactatcaaaacagtccttggctcgctaatggatgggtaatcgaaacagcaggggatgtgagtcatcttactgatatcgctcttgatgaagtacagcgttaatgacaataacagactctcttcgctgtaaaagagagtcttattgttaggccgtttcgcgtttaatgggaatataatactcaaaacgcttaatatgatcttgtggctcggcggtcatcacattgtcatagtgcacttctttaagataatacttttcaatatcatgtcctttacggcgagtaagccccatggttggcaagcaaacaccataaattaagaataaaaattcctgcatggcgcctcgttttgcctctccctcgaagtcaaagcgaatataatcgccagcctccaatatgacttcataagcagtatcatcttctacaaaactcgcataagcaggctcaacggcggtggtgtagataacacgctgttcatcttcatgctcatcactgtgttgtgtatggtgcaaaccataaacctcatgagggatagtgtttaccttagtaatataattttgccaaaatgtctgacgcatatcggaacaagcattggcccattgttctagtgtatggctacaagtttgttcaataccaatcaattttatctccggtaattgcacatattcccatttaggcaaaggctgaggatctaattttattggaggacaaatacctacagcacaccactcatcagaacggcgatatagggctggagttctatcaaactgctttttaaaggcgcgagtaaatgtttgttgagaatcaaaacgatattgtaaagcgatatctaagataggacgacttgttaaacgcaatgccacagccgcgcgagatagacgcctcgaacgaatataagaaccaatcgcctgccctgttacttctttaaacatgcgttgtaggtgccacttagagtaacccgctttagttgcgacattatcgagggatagtggctgatccagattattgtcaagccaagcgagtaaatcacgtatgatgttggtttgatccatacatctcccttagtcatattcgtttatttatgctgtagatggtaaatagcctgaacgtctataacaagttatattgttagataaagatgaaatatagtctttttcaatgagtcatgtatacaaattattctaccagttaacaaaagtttgctttatcctagacaaaatcattctttcttctttttatggaataaatttaatatgtttaatttcaaaaagatactcgcactttctatcttgcttcctatgtcaataatggtgaaagctgaagaaattggttatgtcgatacggtttttaagttttttggtgccaatcataaaattgtcattgaagcttttgatgatcctgaagtcaaaaatgtcacttgctatttaagccgtgctaaaacagggggcatttccggtagtttagggcttgctgaagataccgccgatgcggctatttcttgccaacaagtagggccaatcgaattaagcgaaaaagtcttaaaaggtaaaaatcgtggtgatgttgtttttcaaaaaagaacgtcactagtctttaaaaagctacaagtggtgcgtttttacgataaaaaccgccatgcactgatatatcttacttactctgataaggttatcgatggctcaccgaaaaatgccattagtgcagtacccatcatgccatggaaagagtaatttttttaattaattaacaaaattaataagattaagtgtaagaaatttttttagttgataaattagtttctatttaaaatagtcgctaagatcaatttttatcttttatgctttaataaagaaaaaccccgaaactgaaatccggggtttttagcattattttttactagggtaacactgatatcactcgtctaaatcaccacagaaacgataaccttcaccatggatagtagcgataatctcaggtgtatcaggggttgattcaaagtgtttacgaatacgacgaatggtaacgtctacagtacgatcatgaggttttaattcacgacccgtcatttttttcagtaattctgcacgagtttggatttttcctgggttttcgcagaaatgtaacatcgcacgaaactcactacgaggtaatttatactgttcacctgtagggctaataagagagcgactattaatatctagctcccaaccattaaatttatagctttcaactaaacgacgctcttctgtgccattcgctaaattcatagtgcgtgacaataagttacgagcacggatagttaattcacgaggattaaatggtttagtgatgtaatcatcggcaccaatttcaaggcctaagattttatcaacttcattatcacgacctgttaggaacattaatgcaacacttacctgttcacgtaattcacgggctaatagaagaccgtttttaccaggaagattaatatccataataaccagattgatatcatggtcggacagaatattatgcatctcgttgccatcagtggcttcgtgtacgatatacccttcagcttcgaatatgcttttcagggtattacgagtaactacttcatcttcaacaatcagaatgtgcggggtttgcatatttgctacctaaaattaccaaaaatagaaaaaggatatctgtgtgtaacttctgtgtgtgcaaggtgtgtggttattcatttttgttattagcacgccaaaattagacccagatgaaaattcgataaataaccatcacgttattaattacaaacatgacctattttactgacaatggacgttaaaatcagaatgtaaaatgcccatagtctattaacagcaatataacacctgttgtattaaataccatctaaaaagctaacttttgttgacacatatcaaaatcaagataacagcttaaccttgatttcaatagttaactatataatttgatttatgtaatgcaaaagaaaaatatatgttaaatatagtgagattttatctttttaccagttttgttacaaaaaaagaagtgaaataaaataccttattatttgtaaaagtacaaatgtctaagtaactcttaaatggtagcgttattt
